United States Patent Application Publication US 2007/0010469 A1 - sequence listing, part 3

SEQ ID NO: 11243 - DNA, 783 bp, Homo sapiens
  misc_feature 1, 8, 13, 722, 742, 751, 766, 774, 778, 779: n = A,T,C or G
nagacagnagggnatttattataatttgtttgactttattatagaattgactttccaagtgttcatgagaattattgagaattcgctacatagtatcatttcagttgtgtccacatgaattatcagtcaccttgtcttaatgaataatggttcactacaaatattggttttggcatttaaagtgatctatatctaaatgcagataggaccagggaccactcttgaacattaatgtccaagcatcttaaaattacacatgaggctttcataatctgacttctgccccactctccatctttagcccttttccctgtgtgccctttctctgtcattgctgagctgctggtagtgccctactcactcatccttctattgtaggcaaatactttcattctttcaggcctcgctcccgctcttgctgctgccgggcatgctgtcaccctttcctgccctctaccccttttaatctggccagcctcaatatttaagtctctgcttgggcatgtgttctgaaaagccatccctgagatgctttattttcattctttttagaccctaatgcctagcatgtatgtagcaggactcaatacaaattttctgagtaaaacaaagactgttttacaaagatgatgtgcaagactctccctgcagtcttggagcagagggacagacatatggagaaatatgtcagctaaccggtaagagccgaaaaatagtaaatnctaagcagcctcaggagganaactggttnttgggaagactgcanatcagganactnntaac

SEQ ID NO: 11244 - DNA, 718 bp, Homo sapiens
  misc_feature 1, 9, 542, 618, 665, 667, 694: n = A,T,C or G
nacgacagnagggggaagccaagtctatatttgatgatgatatggatgacatcttctccactggtatccaggctaagacaaccaaaccaaaaagccgatctgcacaggccgcacctgaaccaagatttgaacacaaggtgtccaacatctttgctgatcccctgaatgcctttggaggccagtagagcacacagggtatccacatgttaccctgcagctacattgttgagttagtgatgatattgtatatgctcatggtcttaactggattacaaaaagcaaatactagaacagctagctcatcttttacccaatgtacttagtatttttctgcactggtttaatcatgcttaatactacaaaacaaaaataaatatttcacagtggttggtttgttttgtttttaaaccacagtttgatttagttagccttgctggggccataatatgcttcagggtgtgtaaaagaagaaatctctttgtggctttcatgggcagggaatctcagagatagcaaatgccacctgaccagaagtctttgtntatggatgggaaccctaacttaaggcttgggcaggggaaagagaagaaatgagagattatacttcatgagtcttancatatggaacaggtttactgattctgaggtgcctttgctgtctccangnaagttggcaactggggccccccctgtntatttgtaataaatttattggacc

SEQ ID NO: 11245 - DNA, 683 bp, Homo sapiens
  misc_feature 1, 8, 10, 15, 30, 46, 641, 676, 682: n = A,T,C or G
nagacagnanggggnaagtctgttccaggnacgggctctttcaggnagcagctaaagtcaggggccatgtccaccatgtgatagaaagacaagatggtcctgaaattctccgtgtccattctttggattcagttggcatgggtgagcacccagctgctggagcagagccctcagcttcctctgcattgcccctcttctccctctccaaacagagggaactctcctacccccaaggaggtgaaagctgctaccacctctgtgcccccccggcaatgccaccaactggatcctacccgaatttatgattaagattgctgaagagctgccaaacactgctgccaccccctctgttcccttattgctgcttgtcactgcctgacattcacggcagaggcaaggctgctgcagcctcccctggctgtgcacattccctcctgctccccagagactgcctccgccatcccacagatgatggatcttcagtgggttctcttgggctctaggtcctgcagaatgttgtgaggggtttatttttttttaatagtgttcataaagaaatacatagtattcttcttctcaagacgtggggggaaattatctcattatcgaggccctgctatgctgggatctgggcgtgtggntgtcctgctgccgatgccttattaaatgatttggngaaaana

SEQ ID NO: 11246 - DNA, 463 bp, Homo sapiens
  misc_feature 18, 31, 32, 33, 44, 55, 59, 66, 79, 80, 89, 91, 96, 105,106, 135, 142, 147, 154, 168, 169, 172, 174, 178, 187, 194,195, 202, 207, 208, 229, 238, 247, 257, 263, 288, 301, 329,333, 350, 354, 388, 398, 399, 400, 413, 415, 416, 422: n = A,T,C or G
  misc_feature 429, 430, 437, 442, 453, 459: n = A,T,C or G
ataagggtcctggctgcnaaaacacgactgnnnggtacgggctnccagaatgacnacanaagggtncggctgcgacaannccacacaangnttcgngctgggagnnaacgactaaatacctgcgccctgaagtanggacganggagngtttctnctggggctcaacgnnttntnctcntcaaacaangatcatnnatgttgnctacnntgcatcttataccgagctggnttcctaccntgaccctgntgaagaattncatcgntgctcatcaacagcacaccgtaccnacagtggtacgantcctactatgcactgcccctgggccgcntgangggagcccagctgactnctgnggatgaagagattttaaacaaaaaacgatctctnaaaattcagnnncaaatatgatgangnnaaaaanactgccnnaatcatncagtnttctggatgancatttncagc

SEQ ID NO: 11247 - DNA, 513 bp, Homo sapiens
agaactatgcagtatttaagcctcaacaacccaaatctacaaactttaacaatgcaagtcttactctaatttttaagtatttttgtaggtacttacatgggttataaatcctctctctggacatcaatgtagagtccatctttcaagcactttaatttttttagctgccaaagggtatgaattacattattgtatgctaatttccctgaaatcaatgccttctatgttcaccacagggatacaagcctgttatgtttgatgggaaagaccactacaatctaatggtgatctaaaataacttttttgggctgggtgcagtggctcatgcctataatcttagcactttgggaggccaaggtaggaggattgcttgaagctaggagtttgagaccagcctgggcaacagggtaaggtcctgtctctacaagatcaaaaacttagccgggtatggtggtgcatgtgtgcctgtagtccaagctacttgaaggctgagacaggaggatcggttgagcc

SEQ ID NO: 11248 - DNA, 555 bp, Homo sapiens
  misc_feature 327, 328, 329, 330, 331, 332, 333, 334, 335, 336, 337, 424: n = A,T,C or G
tgttacctgccgacagcataaagcgaggcaaggtccagccgttccgcccggcatacaagcttatggagcagccccctttgaagatctccaggtggacttcacagggatgtcaaagtgtagaggtgatcgagtgtggatcaagaactggaacgtagcctctttgtgtccactgtggaaaggaccccagactgtcgttctgagcactcccaccgctgtgaaggtagaaggaatcccagcctggatccaccacagccatgtaaaacctgcagcgcctgaaacctgggaggcaagaccaagcccagacaacccctgcagagtgaccctgannnnnnnnnnnagccctgctccagtcacacccggaagctgactggtccacgcacggccgaagcctgaggaagctcatcatgagattcatttttcttanattttggacttatacagtaagggcttcaactgatcttactcaaactggggactgttcccagtgtactcatcaggtcaccgaagtaggacagcaaattaaaacaatcttactgttctatagttattatgaat

SEQ ID NO: 11249 - DNA, 788 bp, Homo sapiens
  misc_feature 1, 9, 722, 772, 781: n = A,T,C or G
nggggaggnacatgaatagtcgccaggcttggcggctcttgctctcccaggcagaggagatcgttgggtttcaaggccccgcgggcatttctcgccggccctgcggagagagttcttcactaccacaaccaaggagggatatgataggcggccagtggatataactcctttagaacaaaggaaattaacttttgatacccatgcattggttcaggacttggaaactcatggatttgacaaaacacaagcagaaacaattgtatcagcgttaactgctttatcaaatgtcagcctggatactatctataaagagatggtcactcaagctcaacaggaaataacagtacaacagctaatggctcatttggatgctatcaggaaagacatggtcatcctagagaaaagtgaatttgcaaatctgagagcagagaatgagaaaatgaaaattgaattagaccaagttaagcaacaactaatgcatgaaaccagtcgaatcagagcagataataaactggatatcaacttagaaaggagcagagtaacagatatgtttacagatcaagaaaagcaacttatggaaacaactacagaatttacaaaaaaggatactcaaaccaaaagtattatttcagagaccagtaataaaattgacgctgaaatgcttccttaaaacactgatggaatctacaaacttgagacattcgtatcttgcgcttcagtgntacttgcctggcatacattgggatttatagatctggagagataagctctnctgctgggntgtggct

SEQ ID NO: 11250 - DNA, 714 bp, Homo sapiens
  misc_feature 5, 7, 11, 18, 37, 47, 611, 656, 674: n = A,T,C or G
acagnangggnaaccagnagcccagtcacaggcgagnagccctgggnatgcaccggccagagccatgctgctgctgctcacgcttgccctcctggggggccccacctgggcagggaagatgtatggccctggaggaggcaagtatttcagcaccactgaagactacgaccatgaaatcacagggctgcgggtgtctgtaggtcttctcctggtgaaaagtgtccaggtgaaacttggagactcctgggacgtgaaactgggagccttaggtgggaatacccaggaagtcaccctgcagccaggcgaatacatcacaaaagtctttgtcgccttccaagctttcctccggggtatgttcatgtacaccagcaaggaccgctatttctattttgggaagcttgatggccagatctcctctgcctaccccagccaagaggggcaggtgctggtgggcatctatggccagtatcaactccttggcatcaagagcattggctttgaatggaattatccactagaggagccgaccactgagccaccagttaatctcacatactcagcaaactcacccgtgggtcgctagggtggggtatggggccatccgagctgangccatctgtgtggtggtggctgatggtactggagtaactgagtcnggacgctgaatctgaatncaccaataaataaagcttctgcagaatcagtacaaaaaag

SEQ ID NO: 11251 - DNA, 589 bp, Homo sapiens
  misc_feature 48, 545, 559: n = A,T,C or G
acaagcccgtgtccccgctgctgctggcctcaggatggcccgcgactngcccgacgcccgtggatctggcacaatgacaacaagagcttcctggtgtgggtgaacgaggaggatcacctccgggtcatctccatggagaaggggggcaacatgaaggaggttttccgccgcttctgcgtagggctgcagaagattgaggagatctttaagaaagctggccaccccttcatgtggaaccagcacctgggctacgtgctcacctgcccatccaacctgggcactgggctgcgtggaggcgtgcatgtgaagctggcgcacctgagcaagcaccccaagttcgaggagatcctcacccgcctgcgtctgcagaagaggggtacaggtggcgtggacacagctgccgtgggtcagtatttgacgtgtccaacgctgatcggctgggctcgtccgaagtagaacaggtgcagctggtggtggatggtgtgaagctcatggtggaaatggagaagaagttgagaaaagccagtccatcgaacgacatgatnccgcccagaagtangcgcctgccacctgcaacgatgttgaaacc

SEQ ID NO: 11252 - DNA, 617 bp, Homo sapiens
ctctctctgtcacccagctggagtgcagtggcatgatcttggttcactgcaacctcctgcctcagcctcccaagtagccaggattacaggtgtaggccacgatgactgggtaatttttgtatttttcatagagacggggtttccccatgttggccaggctggcctcaaactcctgaccagaaaggatccacccacctcagcctcccaaagtgctaggattacaggcatgagccactgcacctggctataactttacaatttaaaaaacactttctttcctgtctttcccctcatttgatcttcaaaatgaacttaagacttcttcaaagtgactcagccaaaaagtagtaaaacctaaacttgaactcaagtgtcttgcgacctgagaaccgtttcccttctccacctgggcacattactctccctctacggccaacaactacatgcttactggctcctacctccccactcgggcttatttatcttttctcaagttcttcaagatccctgctatccattcctaaaaccttgcttaaatctcaccatttctacaaagggctctttaattagtctagcttatctgtcacttcagacagcccaggacttaacatatgtag

SEQ ID NO: 11253 - DNA, 586 bp, Homo sapiens
ctgatgtccgattctgtacagagatagctgcttacatcctccgcctcttctttgggttcacggcgggcgatgatggcctcggacttcactcttttcagttcctcttccagctccttgatacggttttccagcttgactttggcctgcttagcacctccaactcgcccctcagcacctcctgctccccggacagctggtcgaccttggcaatcaggtcattcttcaccacattcaaggcgtttttggtttccagaagctgtgagttttccagtagcagattccccacttctttgcccattcctgagaactcccctaggaggtcggccccttcgtccacatccccgatgacctcagaccctgccgtcgacagctcatggtacagggagtcggtgttgatgccgaaagctttgttcacgatgccctgggttgggctgcttcctgtgcggtccaggcgggtctctggacacatgtccagctctggcgtggagtcaataatgtcttgaacatcagaccactcgtcactgctgcacatgcctatactgacgttgcgcatctcctgggtgactgtacttcatgttgcggctgt

SEQ ID NO: 11254 - DNA, 454 bp, Homo sapiens
taaattgagcagaaattcccaaggccaacctagctctcagggaccaacctgcagaactcaagattgagcgaaatgtttaggccagttgagttttgcaaaatgagtggtaagggaaaacagatctagcctgttatttaaaaccagggttcaaaagccctattgggagaggtagtattgtcctagcatttaaattctcatgaaatgtgcttggtctgtgatctcttggtcagatatctgccttccaggcgatcctttgaggttgtgtaattcagctggccctggctcctggtccctgttactgagctgggcagtcgaaccgaagggcagatgagctcaagatcatgccttgggaagcatggtgctctaggggtgcctttttattcctttcattgtattatagactgtttccaagtttatggttagaaatggtaaagtgggtctggtgttttgaggt

SEQ ID NO: 11255 - DNA, 237 bp, Homo sapiens
ctttgggaactagggggctgctggtgggaaatgggagccagggcagatgtatgcattcctttgtgtccctgtaaatgtgggactacaagaagaagagctgcctgagtggtactttctcttcctggtaatcctctggcccagcctcatggcagaatagaggtatttttaggctatttttgtaatatggcttctggtcaaaatccctgtgtagctgaattcccaagccctgcattgtac

SEQ ID NO: 11256 - DNA, 286 bp, Homo sapiens
tatttacacgtttgcccataaatagaaatgtgggctatttactctgaccaagggagcacacaaagagatgaaagatgacgtcagtgttctattactggagtaacatattggatttatgattgctcattgcaacttctttagaaatgatcaagtcagatattagagtgtcagcataaaccactgatgatggttcatgaagcatagatcatgattaatccaattatgttcattagaaaaagttctataatataacctaagagtattttctagtattgcccaatggaac

SEQ ID NO: 11257 - DNA, 597 bp, Homo sapiens
tcggcacgaggctgctttgaaaagtcacctctatcatgtttctagtagcgcttagtgaatatgatcaagttctcgtggagtcagacaatgagaaccgaatggaggaaagcaaggctctctttagaacaattatcacatacccctggttccagaactcctcggttattctgttcttaaacaagaaagatcttctagaggagaaaatcatgtattcccatctagtcgactacttcccagaatatgatggaccccagagagatgcccaggcagcacgagaattcattctgaagatgttcgtggacctgaacccagacagtgacaaaattatctactcccacttcacgtgcgccacagacaccgagaatatccgctttgtctttgctgccgtcaaggacaccatcctccagttgaacctgaaggagtacaatctggtctaattgtgcctcctagacacccgccctgcccttccctggtgggctattgaagatacacaagagggactgtatttctgtggaaaacaatttgcataatactaatttattgccgtcctggactctgtgtgagcgtgtccacagagtttgtagtaaatattatgat

SEQ ID NO: 11258 - DNA, 386 bp, Homo sapiens
cggcacgaggagctaccatttttaacactccttgttatctactgcaacataaataacagtcttaattgcacttatacccatgtcctgtggctctacaaatctgttctttgctgttgtgtctgctggacgcttgaactgatgtttgtgtatgaaatcatgttctgaccctttgtctacaaaggagccttctggaacactgataacaaacatctctttgccattcctgaccagttctctctaccacattttcttcaactccatacttctgcctgtctgctctaaagaaatttcatggagccttcctactactaattcaagacagtctcctcaaaaactggttgactactcttctaatgaccctaacatatgtagcatatactataatt

SEQ ID NO: 11259 - DNA, 628 bp, Homo sapiens
ctacttgttctttttgcaggatcccatcgattcgaattcggcacgaggtttgtttccccgagatgtgaacttgctgaaggaaaacagtgtaaagaggaaggccatacagagaactgtcagctcttcaggatgtgaaggcaagaggaatgaagacaaggaagcagtgagcatgttggttaactgccctgcctactacagtgtgtctgctcccaaggctgagctactgaacaaaatcaaagagatgccagcagaagtgaatgaggaagaggaacaggcagatgtcaatgaaaagaaggctgagctcattggaagtctcacccacaagctggagaccctccaggaggcgaaggggagcctgctcacggacatcaagctcaacaacgccctgggagaagaggtggaggctctgatcagcgagctctgcaagcccaatgagtttgacaagtataggatgttcataggggatttggacaaggtggtcaacctgctgctctccctctcggggcgtctagcccgtgttgagaatgtccttagcggccttggtgaagatgccagtaatgaagaaaggagctctctttacgagaaaaggaagatcctggctggtcagcatgaggatgcccgggagctg

SEQ ID NO: 11260 - DNA, 783 bp, Homo sapiens
  misc_feature 2, 3, 7, 8, 10, 11, 12, 15, 17, 26, 29, 33, 37, 43, 44, 46,53, 60, 141, 217, 680, 736: n = A,T,C or G
gnntttnnannnccngntttctaatnctnttcnaatnctttgnnancgttctntatgcangacccatcgattcgggaatctcctagaaaagttgtgattttcgagccatatccttctgtggtagatcctaatgatcctcanatgttggccttcaaccccaggaaaaagaactatgatcgagtaatgaaagcactggatagcataacttctatcagcnaaatgacacaagcaccatatctggaaatcaagaagcaaatggataaacaggacccccttgctcatcccttactgcaatgggttatatcaagtaatagatcacatattgtgaaactgccagttaacaggcaattgaagtttatgcatactccacatcagttccttcttctcagcagtccaccagccaaagaatccaattttagagctgctaaaaaactctttggaagcacctttgcatttcatggctcacacattgaaaactggcactccatcctgaggaatggtctggttgttgcttctaatacacgattgcagctccatggtgcaatgtatggaagtggaatctatcttagtccaatgtcaagcatatcatttggtactcagggatgaacaagaaacagaaggtgtcagccaaggacgagccagcttcaagcagtaaaagcagcaaatacatcacagtcacnggaaaaaaggacagcaatcccaattcctgccaaagccgtaacttaaaatgcatagnccttatgtgaaagggatcaccttcatctggacctgcacaaacatggc

SEQ ID NO: 11261 - DNA, 501 bp, Homo sapiens
caagctacttgttctttttgcaggatcccatcgattcgaattcggcacgagacccccttcatggacagatcccccacagcctggggcagaagaggcgtcgagggcgccagaagtggcggcagcagcagccgcagcagccaaagagaggcaagagaaagagaaagcgggcggtggaggggtcccggaagagctggtccccgtggttgagctggtccccgtggttgaattggaagaggccatagccccaggctcagaggcccagggcgctgggtctggtggggacgcgggggtgcccccaatggtgcagctgcagcagtcaccactagggggtgatggagaggaagggggccaccccagggccattaacaaccagtactccttcgtgtgagccaaccccacccgctccaccctttttaaaccccccagccctgctcgtgagattgggctgggtagggacagaggaggccgaaatccctcccccatgcttcctgacccttgttg

SEQ ID NO: 11262 - DNA, 548 bp, Homo sapiens
  misc_feature 432: n = A,T,C or G
tacgaatttaatacgactcactatagggaatttggccctcgaggccaagaattcggcacgaggtcaacagtgtatacttctggagccttctactgataaacagaggccccagaagacgatttgacttacctgagctcccagctgggacttaaacccaggtgtgtctgagtcacaactcttcggggatgccgtggtgagctggggctgagctcctgtattcccactcccccaccccacccccactcctgccatatcagggctggtctctgtggactcagcccagggctgcctcctctttgtcaccccaaagtggggcagccagggacagccagggtgtgttcagaatgggttcttcctgcagggcaggaagggcagattgttaaaggggctgcggcccaaaccaccctggtccctcctccggcagtgactcanacccacactgtgccgtgcagctgtgtgccctgcacacccgcttgacggcgcactgctcacttctggggggccctttcagaggcacttttaaagcaaataaaacatttattgttcag

SEQ ID NO: 11263 - DNA, 206 bp, Homo sapiens
cgactcactatagggcgattgggtaccgggccccccctcgaggtcgacggtatcgataagcttgatatcgaattcctgcagcccgggggatccactagttctagagcggccgccaccgcggtggagctccagcttttgttccctttagtgagggttaatttcgagcttggcgtaatcatggtcatagctgtttcctgtgtgaaatt

SEQ ID NO: 11264 - DNA, 514 bp, Homo sapiens
gctccaccgcggtggcggccgctctagaactagtggatcccccgggctgcaggattcggcacgagaactggtctcaagtcagtgtacaggtaagccctggctgcctccacccactcccagggagaccaaaagccttcatacatctcaagttgggggacaaaaaagggggaagggggggcacgaaggctcatcattcaaaataaaacaaaataaaaaagtattaaggcgaagattaaaaaaattttgcattacataatttacacgaaagcaatgctatcacctcccctgtgtggacttgggagaggactgggccattctccttagagagaagtggggtggcttttaggatggcaagggacttcctgtaacaatgcatctcatatttggaatgactattaaaaaaacaacaatgtgcaatcaaagtcctcggccacattgtgaactttgggggatgctcgctccaaccgactgctgtcaccttcaccgttccagtttttaaatcctgagtcaagcc

SEQ ID NO: 11265 - DNA, 368 bp, Homo sapiens
  misc_feature 208: n = A,T,C or G
taatacgactcactatagggaatttggccctcgaggccaaaaattcggcacgaggggtgggggggtgccgttggtgggagagacaaaaagagggagagtgtgctttttgtacagtaataaaaaataagtattgggaagcaggcttttttcccttcagggcctctgctttcctcccgtccagatccttgcagggagcttggaaccttantgcacctacttcagttcagaacacttagcaccccactgactccactgacaattgactaaaagatgcaggtgctcgtatctcgacattcattcccacccccctcttatttaaatagctaccaaagtacttcttttttaataaaaaaataaagatttttatt

SEQ ID NO: 11266 - DNA, 62 bp, Homo sapiens
atttaatacgactcactatagggaatttggccctcgaggccaagaattcggcacgaggcgtg

SEQ ID NO: 11267 - DNA, 612 bp, Homo sapiens
gaacaaaagctggagctccaccgcggtggcggccgctctagaactagtggatcccccgggctgcaggaattcggcacgagagttttaagtttctctaggatagcttatattttaccagcaaatgaaagctttggacctctgcagatatcacttggaagaacagtcaaagacatcttcaagttcatggtcatattcattatggtgtttgtggcctttatgattggaatgttcaatctctactcctactacattggtgcaaaacaaaatgaagccttcacaacagttgaagagagttttaagacactgttctgggctatatttggactttctgaagtgaaatcagtggtcatcaactataaccacaaattcattgaaaacattggttacgttctttatggagtctataatgttacgatggtcattgttttgctaaatatgttaattgccatgatcaacagttcattccaggaaattgaggatgacgctgatgtggagtggaaatttgcaagggccaaactctggttttcctactttgaggagggcagaacacttcctgtacccttcaatctggtgccgagtccaaagtccctgttttatctcttactgaagctt

SEQ ID NO: 11268 - DNA, 219 bp, Homo sapiens
ggttgctcctaagcacctggttggtagaagctttcatgtattgtaacgctaaacctgtaatttttcagggctggggagtgggaagggggttttcatttaaggacgtctgtgctttaagaatattttaggtttgtggtccagctgacattttctttattttaaagttggagaggctgggcgcagtcgctcacgtctgtaatcccagcactttgggaggct

SEQ ID NO: 11269 - DNA, 62 bp, Homo sapiens
ctatgacgtcgcatgcacgcgtaagcttgggcccctcgagggatcctctagagcggccgccc

SEQ ID NO: 11270 - DNA, 537 bp, Homo sapiens
gtctacgtcctggccaacgagccatccgtggccctgtaccggctgcaggagcatgtgcgtcgctccctccccgagctggcccagcacaaggcagacatgcagcgttgggaggagcagagccagggagccatctacactgtggagtacgcctgcagcgccgtgaagaacctggtggacagcagcgtctacttccgcagcgtggagggtctgctcaaacaggccatcagcatccgggaccatatgaatgccagtgcccagggccacaggtagctcctgggaccgcccgcccccactgccactcccagctgcaaggaccgtctctcagctgcgctgggaaccgctgcttctcgcttattagaaaactgtctctttccttttgtcctggtgtctggtgatctcctcttgtcctgtggcatctataacctgagttcagtcacttaataccgaggtcctgcgctctgctgtgtgcctggccctgggctgggcactggggacatagcagtgaccgagacagacaggctcacaaggagacatacg

SEQ ID NO: 11271 - DNA, 730 bp, Homo sapiens
  misc_feature 609, 659, 660: n = A,T,C or G
gcaagtcacgggagtttatttatttaattttttccccagatggagactctgtcgcccaggcggcattttcccccatcagaaagccggggctcctgtacctcaaaatagggcacctgtaagtcagtcagtgaagtctctgctctaactggccaccggggccattgtcttctgacacagccttgccaggaggcctgccatctgcaaaagagagttcactccttccgctattttcatgtgagtgtatccaatttccttgataaactccagtttcaggtattctgccatttggaaagttttacacactcgaaagatgttgccaatgatatcttctggtgagtagcccagatgccacaagtgagcaagaatcttgtaggcttcgtcaatgttggcattcacacagtgctggatcatctcctttaccagcagtgggtggggctcgtcacagaccttgaacacgttctcactgttaatgaagccaaatcctgagaaggtggactgcaggttgttcagcgcctgcctcatgtctcccttggccgtgaagatgatggcttctaggccgtcatcagtgtagggtaccctctccttctcgataacattcatcagcctggntgagatcctggcgtcggtcagctttgtgtacccggagactgcacagcggnnactgatgggctcgatgatctatcccgagcattacaagcaagggcgaagcgagtgttttagagtgaatttc

SEQ ID NO: 11272 - DNA, 701 bp, Homo sapiens
  misc_feature 645: n = A,T,C or G
gcggccgctccctccgcctattccctccttgctcgagatggatctgcccgtgggccccggcgcggcgggggccagcaacgtcccggccttcctgaccaagctgtggaccctcgtgagcgacccggacaccgacgcgctcatctgctggagcccgagcgggaacagcttccacgtgttcgaccagggccagtttgccaaggaggtgctgcccaagtacttcaagcacaacaacatggccagcttcgtgcggcagctcaacatgtatggcttccggaaagtggtccacatcgagcagggcggcctggtcaagccagagagagacgacacggagttccagcacccatgcttcctgcgtggccaggagcagctccttgagaacatcaagaggaaagtgaccagtgtgtccaccctgaagagtgaagacataaagatccgccaggacagcgtcaccaagctgctgacggacgtgcagctgatgaaggggaagcaggagtgcatggactccaagctcctggccatgaagcatgagaatgaggctctgtggcgggaggtggccagccttcggcagaagcatgcccagcaacagaaagtcgtcaacaagctcatttcagttctgatctcactggtgcagtcaaaaccggatcnctgggggtgaagagaagatccccctgatgctgaacgacagtggctcagcacattcc

SEQ ID NO: 11273 - DNA, 446 bp, Homo sapiens
  misc_feature 150: n = A,T,C or G
gggattccataaaatgacagttgtgtcctagccacatcagacagctatctaagctctggactacccctttgtgcagctgaatcactgcagggttgaccatgcctggtgccacagccatggtttccatttctagatgaaaggatggcctangacataggtctcaaagactcttggatcagaatcaggagattagggaaaacaggatggatacctgagcactaacagcagtagacgtagacctctgtcctttaccatctgaggtcttctggattctttgtggggttaattttgatttgatgtcatctgtttgcccttcatcttgcttgcaagtgtgcatggttcaatccctcatatccaggaaatgaattttgcaattgggccagatgctaatttgcacgttgattcaccttctttgcctttaagccttttttttctttttttttttt

SEQ ID NO: 11274 - DNA, 746 bp, Homo sapiens
  misc_feature 1, 643, 679, 698, 709, 710, 719, 725, 730: n = A,T,C or G
nagacagagggatgaccgaatcagagccttggtggccactgactctcgtgcttattgcagatgctgtggttggcctcacaagcaacgccttatgctgatgtgcagaggtgccagctgccatttgccaaactctgcatttcatttcatctaaggcttaacccctcttccttcctggtgtacctgtgtctcctcggaaggaagtcatagtttagatgaaaccattttttgtacaatgtaaagatcatctgagcaagatgagcattttgtaaaaatgaaaatgtgactcacataaaatcaggaacttgacacagtgttgcattaataactttagggtgcagacatgctgtgtgaatctcacaatgcgtcgtagatgtcgcgtgttggaagggagcaggaggaaggactgatactggcaaatcagtagagtgaggtgatccttagcaacgtgccaggacacttcctgtgtgcctgcagttgtcagggaccatttgggatcccgaatctcattctctaaaactgctttcttgaaacatgttacttccttagtataatcaatgtatactcccttactggcctgaaacgttgtatagctacttattcagatactgaagaccaacggactgaaaaagaacaacattagctntttatgctgcagaccaggacacacattcgccatctncacctataccttcgattgngctttcactcnnccataattntccaanacctntatacctttttcccac

SEQ ID NO: 11275 - DNA, 608 bp, Homo sapiens
  misc_feature 147: n = A,T,C or G
acagaggggtctggtttgatgccactattggctatctgtccatcacagccaactacacagaccagtgggagagatggtggaagaacccagagcaagtggacctgtatcagttcatggccaaagacaatgttcctttccatagcttantctttccttgctcagccctaggagctgaggataactataccttggtcagccacctcattgctacagagtacctgaactatgaggatgggaaattctctaagagccgcggtgtgggagtgtttggggacatggcccaggacacggggatccctgccgacatctggcgcttctatctgctgtacattcggcctgagggcctggacagtgctttctcctggacggacctgctgctgaagaataattctgagctgcttaacaacctgggcaacttcatcaacagagctgggatgtttgtgtctaagttctttgggggctatgtgcccgagatggtgctcacccctgatgatcagcgcctgctggcccatgtcaccctggagctccagcactatcaccagctacttgagaaggttcggatccgggatgccttgcgcagtatcctcaccatatctcgacatggcaac

SEQ ID NO: 11276 - DNA, 608 bp, Homo sapiens
  misc_feature 83, 396, 532: n = A,T,C or G
acagaagggatatcagaacatgactgtggatattctctgcaatgactgtaatggacgatccactgttcagtttcatatattangcatgaaatgtaagatttgtgaatcctataatactgctcaagctggaggacgtagaatttcactggatcagcaatgacgagcctacacagtactggagaacttggcattttctgatatagaaaaaggctttccttggtatcgtgttatcatgtgtcgtcatctatgcattagagttgatgtgttttgtactagtgtcacagcataaaatcatattacaagtacgtaaggattcagggtctcttgatagacttatcatagctctatattgaatgaaagccactgtgcttgtgttttgattggaaattcctttantgtcagttttttggaagccaatgatgtttgccactgatacattcatagaagtgtattatattttcatgaagctttgctttaagtgacactacgcgtgcagttcatttctagttcttgatagaactgcacttaattntcagtagtagtcttgactttttaagggctgtgttatattaagttctcccttactgttaaaacctaattaaatatgc

SEQ ID NO: 11277 - DNA, 752 bp, Homo sapiens
  misc_feature 475, 571, 611, 652, 658, 673, 675, 687, 711, 716, 724, 727,732, 735, 743, 750: n = A,T,C or G
gggattcaatttctcagtttcaatccagaatgatcaggtaaatcaactgttttctttttatacttcgttaaaaggaaagtggggaggggggtggtaatttttacaggtttaatgtagttaaatgaatgtacctaaaggttgaagatttttgtttagttgcagaaaatagagtttaacgtctgtgtttaagataaatttaatgtctaaatgtattttatttgctgtataacactgaaagcactcattagagaaatgttgagactgaattttttaatatgctgatctttattttctaactttctgtgctgattaaattttattatctgtattcatcagagcgtaggccatacaaatgaatttaaagacatttttctttgacatcctagacaaaaatagaaaagagagtcattaaaaaaaatttttaggttgtgtgtggtggctcacacctgtaatcccagcgctttgggaggccaangcgagaggactgcttgagcccaggagtttgagaccagcctgggcaaaatggtgaaaccctgtctctacaaaaaatgcaaaaatagccaggtgtggnggcgtgtcacccgtggtcccagctccttggtggatgaggnggaagatcgcttgagcctgggagatgaactccgtgagtgcncctgcnctcaacctggggaanancaaaccccgctnagtaaaaaaaaacaaccaaaaagnttaanaaatggcnttnttccnggnaaaaatgntttttgngg

SEQ ID NO: 11278 - DNA, 64 bp, Homo sapiens
tccaccgcggtggcggccgctctagactagtggatcccccgggctgcaggaattcggcacgagg

SEQ ID NO: 11279 - DNA, 541 bp, Homo sapiens
ttttatgtttaacaacaaaaaaaactttattgaattacaaattttaaaatggatcacttaaaagtgagattattttattctgaaacattatttcaaaaatgtactttgtttttgaaataaaacaaaatcttcaactatgaactgacaaaatagaggtgagttggtaccagtgggccaattcttaacacggacatttaaaaatgctgctttctgtattacaacaaaatgatatgcaataagaaattggaaaaagggagcaaaggagagtgcaaagcatgtactgaggtctttctacgggtgcctgacagaatgcagattcagcataaaatgtagactttgcaacagtggcctttaaagtatgctagagcaagtgtaccctagggaacctatgtcaaaacaatttttgtcttactccaaacagaaaaaatggtacacactttaacaaaagcaaaacttaattgtaagatctgtactgtaaagctacttgctatagcccatatattcagtttgttcaacaatctcactcatgacagaaaaagtc

SEQ ID NO: 11280 - DNA, 463 bp, Homo sapiens; identical to SEQ ID NO: 3656

SEQ ID NO: 11281 - DNA, 826 bp, Homo sapiens; identical to SEQ ID NO: 3628
  misc_feature 26, 27: n = A,T,C or G

SEQ ID NO: 11282 - DNA, 818 bp, Homo sapiens
  misc_feature 514: n = A,T,C or G
ggtcatcttcagagtcagatactaagagaactgagagaactgtttcttgagaaacaaactggggtatcttcaacatgaaatgatttaggagcatagcctgatgcttgaggtttacttggttctccctgtgagtcagggggctcagtctctttgataggttcattttctttattgttgttttcttggtcaatgtcactgagagaactcagagaggaattatgagaaaagcaaactggagtattttcaatagcaaaattctgtaacttttcatcagttgctgcccctctgtctggtatgtctttggatgactggggaaaagtggattgtttctgaagtatgggtttaggctgacctcgatttattggctgctttgcaatagcttgtgtcttattagctgattgttggttggaggttagttctgtgtggctggtaactttagcctctgattccttatttccttttgcctttcttaattcagccttttccctggaaaggtcaacatcatcatcatcanaatctagagaactcaaagaatcatttcgtgaaaaacagtaaggagtttcttcaataggcgtgtaatgatgaggtgaatcaaaagcaaaactcctcctgactcatcctcaataattggggacctatacatggaagccctgggaattatttccacaatcccgttccttgaaaccctgtgtgggggagaaaacccccccggcattgaaattaatttttgggagccgcacttttttcctaccacgtggcccaatattccgatattgtgggggtaaaggttctaccggggggaagtgggtttccttttc

SEQ ID NO: 11283 - DNA, 409 bp, Homo sapiens
tccaccgcggtggcggccgctctagaactagtggatcccccgggctgcaggaattcggcacgagggcaagaccaaccaagatgagtgccctgggagctgtcattgccctcctgctctggggacagctttttgcagtggactcaggcaatgatgtcacggatatcgcagatgacggctgcccgaagccccccgagattgcacatggctatgtggagcactcggttcgctaccagtgtaagaactactacaaactgcgcacagaaggagatggagtgtacaccttaaacaatgagaagcagtggataaataaggctgttggagataaacttcctgaatgtgaagcagtatgtgggaagcccaagaatccggcaaacccagtgcagcggatcctgggtggacacctggatgc

SEQ ID NO: 11284 - DNA, 440 bp, Homo sapiens
ttaatggcagctaaagatatacagattactgttaaattgcagtccttttttttttaaagatattttcttgaattatttagaacatggtaagcctggtattttttaatcaaacaaaatatttatgaaatgggttttctcttaattctggattcatcatggctttctaataccaattgtaatatttacaatattcaccaaaacttagaattttgcaaatgctggaattctgccagtgtttctttgctaagccttgcatgcaaaatttgaaattttaacattggcacccaaaacctacatggaatgtatgtctggagtatttcaaactttacattgaaacataatttccttggaaaacaaaccataagcctgaggaggtttttatcaactggaatgctttatattagtttgtttttcactgtacattcctcattttacattca

SEQ ID NO: 11285 - DNA, 410 bp, Homo sapiens
  misc_feature 310: n = A,T,C or G
cagggcacgctgcacccgaaaactccggaactgggtggtggagcaagtggagagtgggcagtttcccggagtgtgctgggatgatacagctaagaccatgttccggattccctggaaacatgcaggcaagcaggacttccgggaggaccaggatgctgccttcttcaaggcctgggcaatatttaagggaaagtataaggagggggacacaggaggtccagctgtctggaagactcgcctgcgctgtgcactcaacaagagttctgaatttaaggaggttcctgagaggggccgcatggatgttgctganccctacaaggtgtatcagttgctgccaccaggaatcgtctctggccagccagggactcagaaagtaccatcaaagcgacagcacagttctgtgtcctctg

SEQ ID NO: 11286 - DNA, 532 bp, Homo sapiens
ctatttaggtgacactataggaacagtttgtacaaaaaacaggctggtaccggtccggaattcccgggatatcgtcgacccacgcgtccgtgggaggtcatgagctatggagagcgaccctactgggacatgagcaaccaggatgtcatcaatgccgtggagcaggattaccggctgccaccacccatggactgtcccacagcactgcaccagctcatgctggactgctgggtgcgggaccggaacctcaggcccaaattctcccagattgtcaataccctggacaagctcatccgcaatgctgccagcctcaaggtcattgccagcgctcagtctggcatgtcacagcccctcctggaccgcacggtcccagattacacaaccttcacgacagttggtgattggctggatgccatcaagatggggcggtacaaggagagcttcgtcagtgcggggtttgcatcttttgacctggtggcccagatgacggcagaagacctgctccgtattggggtcaccctggccggccacc

SEQ ID NO: 11287 - DNA, 496 bp, Homo sapiens
ctatttaggtgacactataggaacagtttgtacaaaaaagcaggctggtaccggtccggaattcccgggatatcgtcgacccacgcgtccgcccacgcgtccgataacacacgccggagggtcgcacgcgggttccagttgtgattgctggagttgtgtattgccaggaggctctccgagattggggtcgggtcactgcctcatccaccggagcgatggcgtttctccgaagcatgtggggcgtgctgagtgccctgggaaggtctggagcagagctgtgcaccggctgtggaagtcgactgcgctcccccttcagttttgtgtatttaccgaggtggttttcatctgtcttggcaagttgtccaaagaaacctgtaagttcttaccttcgattttctaaagaacaactacccatatttaaagctcagaacccagatgcaaaaactacagaactaattagaagaattgcccagcgttggagggaacttcctgattc

SEQ ID NO: 11288 - DNA, 644 bp, Homo sapiens
  misc_feature 550, 552, 632: n = A,T,C or G
cagaggttttaaaatgtgtattaaatttcatgggtatgcacagtagagaaggcatcctcacagaggcaagagttccaacctggtgacaatggcagtgagccacccgtctagttttcaaccatctaagatagcagcagctggctgttgcccctggactgagatttcttcctctttgctggtggggggcggctggaacggatgggagacacagtgggaggctgaggccccttgggggtatcattctgtttctggaaggcagctttctcaaaaggctgctctggcaactgctgcttctcaacccccttggcccttccaaggggctgatgatggtccttaggtttcagggtggcctgagtcttggatggggataacacagccggtgtttgtgtgtctgtgcccttgggaggggcattctgcctgaggaaagcaactttcttggaggactgtaatttaggtgatcgttgctttagcttcccagtcacctttggctccctgatcccttcggcttttccagctggctgactgctatcctggaagctgaaggaagctngngtctttgtgacaaaaggtacagtggacaattctgagtctgccccttttgagatgccattcagcttcctggaggaggcctntcttggatggtg

SEQ ID NO: 11289 - DNA, 73 bp, Homo sapiens
gtacagtacaccttgcacccgaaggcagggttacttcatcctatggaaaaggtcccccccaccccggtagcca

SEQ ID NO: 11290 - DNA, 606 bp, Homo sapiens
  misc_feature 420: n = A,T,C or G
gtttttgttgtttttacacaggaatagttaggtctgtcatttgagggagcccaggggacctggaacgggtcacacgggcagtgctcagttctggtgcctcttcatatgcagggccaggtggtcagagcgcgagaagctgcggttgcacaccccgcactggaagggcttggcgcctgtgtgcttccggtagtggcgggtcagctcatccgatcgcgcgaacctccagtcgcagccttcccaggtacacttgtatggcttttcaccagtgtgagtcctcaggtgagcttttaaatgagaagacttggtataaacttttgtgcaaccagggtaatcgcagtagtggatgcgtcgtttctccaaatcggggttactccttctattgtatctgacaggttggatgttttgtgagttaactggcanggtggtgggtaaatttggattgtgaattgccagtttagaagcaattgtagcagcataggatggaggtgggggttaattctggagcatctctgcttgtctatctggactttcaggctctgagcttggtggtgacgggggaaagtcagtgtcctggtgtggaagaaactgacttggcattgtgtatgt

SEQ ID NO: 11291 - DNA, 439 bp, Homo sapiens
  misc_feature 45, 65, 68, 417: n = A,T,C or G
gcgcgctcaccttcactcgcgtgtacagcgggacgcagacatcgnatccagtttggtgtcgcggnacnggagacgggtatccttcgacgggaaggcgggctctggcacacgctttcctcctggccccggcattcagggagacgcccatttcgacgatgacgagttgtggtccctgggcaagggcgtcgtggttccaactcggtttggaaacgcagatggcgcggcctgccacttccccttcatcttcgagggccgctcctactctgcctgcaccaccgacggtcgctccgacggcttgccctggtgcagtaccacggccaactacgacaccgacgaccggtttggcttctgccccagcgagagactctacacccgggacggcaatgcttgatggggaaaccctgccagtttccattnatcttccaaggccaatcctaat

SEQ ID NO: 11292 - DNA, 646 bp, Homo sapiens
ggccgggcactgctacccattctccagtggcacaagcaccccaatgattactttagtaaggaggcatccaaattgtactttaacagcttgaggacttactggcaagagcttatagacctcaacactggtgagtcgactgatattgatgttaaggaggctctaattaatgccttcaagaggcttgataatgacatctccttggaggcgcaagttggtgatcctaattcttttctcaactacctggtgcttcgagtggcattttctggagccactgcttgtgtggcccatgtggatggtgttgaccttcatgtggccaatactggcgatagcagagccatgctgggtgtgcaggaagaggacggctcatggtcagcagtcacgctgtctaatgaccacaatgctcaaaatgaaagagaactagaacggctgaaattggaacatccaaagagtgaggccaagagtgtcgtgaaacaggatcggctgcttggcttgctgatgccatttagggcatttggagatgtaaagttcaaatggagcattgaccttcaaaagagagtgatagaatctggcccagaccagttgaatgacaatgaatataccaagtttattcctcctaattatcacacacctccttatctcactgctg

SEQ ID NO: 11293 - DNA, 650 bp, Homo sapiens
aaagcgctgatcctgtttatttggcaggaaaacgagacaatccagcagcccaggagggacaggtggacttaatcctcctcctcgtcgtctccagccccagccccaccctggcccttcttggcattcttcctcttcacgcggcccgggcggccacccccgtagggagagcgcagagagaagtcgatgtgcttctgggaatccaggcggacaatgaaggacgggatgttcaccacctgcttgcggaccctgatatggcgctggcggatcagcacgcgagcgtggtggatggacttggccaagcccagcttgaagacctgggtctgcaggcgtctctctaagaaatcctctatcttcaggcccaggatgtaatccagcttcatcttgccctcatccagcaccccaatgcggaccagccggcgcagcagggcgttgccttcgaacagacgccgtgggtccttctcatcaagcgtcagcagttcccgggcggccttgcggatcttggccagggtaaatttgaccctccagacctcacgtttgttccggagcccatactcgccgatcagcttcagctcttggtcgagacgagatttctcgaagggtctccgcggggtcacataagttttgcgacaaacccagctccgggccactgg

SEQ ID NO: 11294 - DNA, 522 bp, Homo sapiens
tccaccgcggtggcggccgctctagactagtggatcccccgggctgcaggaattcggcatgagggagcccctgctggtggtggcggccttctacatcctgttcttcaccgttatcatctatgttcggctggacttctccatcaccaaggatccagccgcagaagccaggatgaaggtagcctgcatcacagagcaggtcttgaccctggtcaacaagagaataggcctttaccgtcactttgacgagaccgtcaataggtacaagcaatcccgggacatctccaccctcaacagtggcaagaagagcctggagactgaacacaaggccttgaccagtgagattgcactgctgcagtccaggctgaagacagagggctctgatctgtgcgacagagtgagcgaaatgcagaagctggatgcacaggtcaaggagctggtgctgaagtcggcggtggaggctgagcgcctggtggctggcaagctcaagaaagacacgtacattgagaatgagaagctcatctc

SEQ ID NO: 11295 - DNA, 494 bp, Homo sapiens
cgactcactatagggaaagctggtacgcctgcaggtaccggtccggaattcccgggtcgactactactactaaattcgcggccgcgtcgaccttctggaggaatactgttggcgttcaaaagcattgctgtttcaacaatggccaagaacaaattaagagggccgaagtccaggaatgtatttcacatagccagccaaaaaaaactttaaggctaaaaacaaagcaaaaccagttaccactaatcttaagaagataaacattatgaatgaggaaaaagttaacagagtaaataaagcttttgtaaatgtacaaaaggaacttgcacatttcgcaaaaagcatttcacttgaacctctgcagaaagaactgattcctcagcagcgtcatgaaagcaaaccagttaatgttgatgaagctacaagattaatggctctgttgtaatatactggtgatgcatctaattctccacaaagaccaataaattgaatgtttt

SEQ ID NO: 11296 - DNA, 586 bp, Homo sapiens
ccccgggctgcaggaattcggcacgagtggggctgcctggagcaggtggagaacggctatgaggagtggttgctgaatgagatacggaggctggagcgactggaccacctgtgcaaaaaagttccggcagaaggcctccatccacgaggcctggactgacggcaaagaggccatgctgcgacagaaggactatgagaccgccgccctctcggagatcaaggccttgctcaagaagcatgaggccttcgagagtgacctggctgcccaccacgaccgtgtggagcatattgccgccatcgcacaggagctcaatgagctggactattatgactcacccagtgtcaacgcccgttgacaaaagatctgtgaccagtgggacaatctgggggccctaactcacaagcgaagggaagctctggatcggaccgagaaactgctggagaccattgaccagctgtacttggagtatgccaagcgggctgcacccttcaacaactggatggagggggccatggaggacctgcaggacaccttcattgtgcacaccattgaggagatccagggactgaccacagcccatgagcag

SEQ ID NO: 11297 - DNA, 477 bp, Homo sapiens
tggtacgcctgcaggtaccggtccggaattcccgggtcgactactactactaaattcgcggccgcgtcgaccttctggaggaatactgttggcgttcaaaagcattgctgtttcaacaatggccaagaacaaattaagagggccgaagtccaggaatgtatttcacatagccagccaaaaaaaactttaaggctaaaaacaaagcaaaaccagttaccactaatcttaagaagataaacattatgaatgaggaaaaagttaacagagtaaataaagcttttgtaaatgtacaaaaggaacttgcacatttcgcaaaaagcatttcacttgaacctctgcagaaagaactgattcctcagcagcgtcatgaaagcaaaccagttaatgttgatgaagctacaagattaatggctctgttgtaatatactggtgatgcatctaattctccacaaagaccaataaattgaatgttttata

SEQ ID NO: 11298 - DNA, 576 bp, Homo sapiens
agtcccggtcaccagcaaccatgacggaccagcacgctgaggccaagtcctacctcatcgaagagatgatcgctgagttcaaggctgcctttgacatgtttgatgctgatggtggtggggacatcatcgtcaaggagttgggcacggtgatgaggatgctgggccagacacccaccaaggaggagctggacgccatcatcgaggaggtggatgaggaccgcatcggcaccatcgacttcgaggagttcttggtcatgatggtgcgccagatgaaagaggacgcgaaagggaacagcgaggaggagctggccgagtgcttccgcatcttcgacaggaatgcatacggctacatctacccagaggagctggctgatattttcagggcctccggggagcacgtgacggacgaggagatcgaatctctgatgaaagacggcgacaagaacaacgacggccgcattgacttcgacgagttcctgaagatgatggagggcgtgcagtaaggagtggacagtagcctctaccaagatcgcgtgtccctagggtgtgggagactccgccctgccgggtccccac

SEQ ID NO: 11299 - DNA, 556 bp, Homo sapiens
cttaggagagaggtctaggttgggaatagaaatgtgggtcatcggtgtataaatggcatttaaagccatgaaacccggttaaattacctagggtctaagtacaggtgaaaaagctgtgcaagaagtgagttcttgggaacctccaacattttagagaggagaaccagcaaaggagactcagcaaaaacagctagcaagagtgaggcaaggcagccctgaagccagacacgatgtttcaagaagaagggagagggcaactgtatcaaaggctgctgtgcctcagttaagatgagtgctgggaactggcctcggtttaacgttgaagcacagtgaccttgacaagaacagtttctgaaagcttagttggagtgggcacaagagagcctgaaaggcagagctggagatggtattatagaaagcttttcttgagagcccacagaaatgagtctgtagcttgattagactgtagggtcaaggaaggctgtttgtgatccagtgggagtgatccaggagaagagtggggaaccacagccaggtgtgggcaagggagtacaga

SEQ ID NO: 11300 - DNA, 622 bp, Homo sapiens
attgaaataaggatttaaaggggtatttgtaaactttgccctccttgagaaatatggaactaccttagaggttaagaggaaggcagtgttctgacttctttaggtgatctgaaaaaaacacccttatcctccagtgtaccatctagagatcaccacagaatccatttttttcccagttccacaaaacactctgtttgccttcagtttttactcactagacaataattcaagtttagaaacaggtaatcagctatttgatcttaaaaggcaatgaattgttgggatatcagtgaactatgttgtatacttttgaatttttacattttataaatggaattgaaagttggataactgctttttttaaattttccaacagaagtaacaccacagttgctttgtttctttttatagcttacctgaggttcagttcttctttgtgaacctgtgagtactccacagtttactgggggaaaaggcttcagtaaagcagaggctagaattacagtatttatacatagcaacttttcataaagtagaaaaattcaaaggaagctgtctcaatttgagaataccagctgggcacggtggctcacgcctgtaatcccagcacttactttgggag

SEQ ID NO: 11301 - DNA, 727 bp, Homo sapiens
  misc_feature 1, 5, 7, 14, 20, 27, 29, 33, 37, 58, 85, 87, 91, 94, 104,113, 127, 130, 132, 134, 137, 139, 140, 144, 145, 153, 156,160, 161, 162, 163, 167, 168, 171, 178, 188, 190, 192, 195,203, 206, 211, 215, 216, 227, 230, 236, 241, 243, 248: n = A,T,C or G
  misc_feature 268, 277, 299, 301, 303, 304, 315, 316, 324, 328, 329, 330,343, 345, 346, 347, 352, 357, 359, 369, 376, 379, 383, 385,404, 406, 432, 433, 434, 450, 462, 463, 466, 467, 477, 480,499, 514, 525, 537, 546, 549, 554, 560, 581, 588, 594: n = A,T,C or G
  misc_feature 600, 622, 633, 634, 655, 682, 689, 706, 708, 711, 712, 721,724: n = A,T,C or G
ngggnanggaagtncagcangcacagntnagtngcangctgaatcggctgtgttcaangcatgcccttccatactgcactgaacnancccnttncggcatttanacttgaatntttggctgatattntgngngnaantnntggnntgagcctntcncctnnnngganncanctggtantgttgccagngntnaanctttcaancancactnggannttccgaaattntgnactccnccatnanctttnttgttcgggatattaacaantgtgatttngctaacgaaatgcatttcattngnannaattcaatganncatttttncaannnaccactacgtgangnnncaaantcatncntggctcatanattgatnccnaagngngagacatgcccctggattntnatgtcttaacaatgctgagtgcattnnnttttcagagtctacantgcctttatcannctnngacttgtagnaancctggcgctgtggctcacncctgtaatcccaacnctttgggaggncacgtgggtgcntcacactgncgngggtnaagacnaccctggcaatatggggaagngcggctntctaantacaanagtacctgtcgtggggctgatnccttgtgtccnnctctccggagctgagcaaganaaaccttgacccgtagtggaggtgcangagtcanacctccctggctcactngnccnnaaaaaaaanccnttt

SEQ ID NO: 11302 - DNA, 787 bp, Homo sapiens
  misc_feature 1, 9, 14, 25, 42, 542, 567, 685, 759, 767: n = A,T,C or G
nacgacagnagggnagaagaaaggnactggcccttgaaaaanaaaaggagcaacttcaaaagaagctacaggaagccttaacctcccgcaaggcaattcttaaaaaggcacaggagaaagaaagacatctcagggaggagctaaagcaacagaaagatgactataatcgcttgcaagaacagtttgatgagcaaagcaaggaaaatgagaatattggagaccagctaaggcaactccagattcaagtaagggaatccatagacggaaaactctcaagcacagaccagcaggaatcgtgttcttccactccaggtttagaagaacctttattcaaagccacagaacagcatcacactcaacctgttttagagtccaacttgtgcccagactggccttctcattctgaagatgcgagtgctctgcagggcggaacttctgttgcccagattaaggcccagctgaaggaaatagaggctgagaaagtagagttagaattgaaagttagttctacaacaagtgagcttactaaaaaatcagaagangtattttcagttacaagagcagatnaataaacaggggttagaaatcgagagtctaaagacagtatccatgagcctgaagtcatgccgaagcctgcagcagaattgggaagcagccactacaattgctggctagacatctaaanaattgcacctaactggatgaactgcaaaactctaacaaaagaagaaacgtagctacttctgacaactatggaanaacacttnctaaatcaaagaatataaaa

SEQ ID NO: 11303 - DNA, 739 bp, Homo sapiens
  misc_feature 2, 15, 18, 23, 35, 46, 48, 55, 68, 75, 81, 99, 377, 378,417, 421, 443, 465, 470, 475, 479, 484, 488, 498, 500, 505,508, 513, 514, 524, 527, 532, 562, 568, 597, 599, 603, 637,642, 663, 670, 677, 684, 686, 693, 698, 718, 726, 733: n = A,T,C or G
  misc_feature 735, 737: n = A,T,C or G
anttacttgggtttncgntaaanctttttttgttncttttggccgnancggcctncggctgcgatagncgacagnaggggnatgatctgaaacttcagnattagagaaaaatttcaaatgtgcagcaatagagatgaaaatacagaatgggaaagatgtgatggaaggagaggtgctccagtatttctctgaaagagtgttaaaagaatacaggaaacaataatcaaaaggaggaatgattaacaaaaacagataaatattttcagatggaatgggaggaatacatgagcccaggagttgaagactaccctgggcaacatagtgagaccatgtatttacgtgtgtgtgtgtgtgtgtgtgtgtgtgtgtgtgtgtgnnaccctgggcaacatacaccctgtatttacgtgtgtgtgngcgngcatgtgtgtgtcagggtctcnctcccattgcccacgctggagngcagnggtgngatnataanttcnctgcagcctngnctttncangctcnngtgattcttncanctcantctcccaagtcctgtgactacaggcatacnccaccntgcccatctaatttttctttgtttaatananacangattttgccatgtcccccagggtggtttaaaacntaaanctctgcccccctcaccctctnaaagttntgggatnacaggcntnaatcccnccccngcctttaaaaaaattaaaantacccagnggggggngngncc

SEQ ID NO: 11304 - DNA, 557 bp, Homo sapiens
taagaaatataacacttatatttaatgaattcacttatatttagtgaatattcacttatatttagtgaatagtaggctgggcatggtggcttatgcctgtaatcccagcactttgagtggtcaggagttcaagaccagcctggccaacatggtgaaatcctacctctactaaaaatacaaaaattagctggtatggtggtggacacctgtagtcccagctactcgggaggctgaggcaggagaatcacttgaacccaggaggcggaggtttccgtgagccaagatcgtgccactgcactccagcctcggtgacacagtgagactctatctgaaaataaataaataaataaatgtgaatagtagaaattttggagaataactacatcatagggaccatagaacataatgttcaaatttagtagatctgattacatcagaattaaagatttctgttaaaagaactatacacagagttaaaagtcagatgtcagctttggaacttttaaaacctaaagggaataaatacctgtatatattaagaactcctaaaagttaac

SEQ ID NO: 11305 - DNA, 411 bp, Homo sapiens
tcatgtcactgcacttcaatctgggcgacagagcaagactctgtctcaaaaaaaaaaaaaaaaaaaatggaaatattgggaaacctttgaaattttggaccccacagcctaataatttgaaccggtaagaacggttaaaaaccaacttggccccctgaaaagggggggcttgaaattttaaaatttaaagggttgccttttggtttttggggggaccaaccaaaaaaaaccagggttaactggggggaaaaaggggaaccctttttacccgaacggggaacaactgggggggtcccgaaatccaacgggcccaatgggggcttttggttggcccggatttaacggccgggggaaggaaaaaaaaaaaccccccttgttttttgggtttaaaactaaacctccgggaaaaag

SEQ ID NO: 11306 - DNA, 783 bp, Homo sapiens
  misc_feature 587, 654, 658, 682, 692, 704, 707, 720, 736, 739, 741, 754,765, 774, 779: n = A,T,C or G
atcctagggctaggcatggtggcttacacctctaatcctagcactttgggaggctgaggtgggaggatccgttgagcccaggagttcaagaccagcctgggctatatagtgagaccccatgtctacaaaaaatacaaaaattgaccaggcatggtggtgcacacttgtagacccaggtactctggaggctgaggtggaaaggattgcttgagcacaggaggttgagactgcagtgagtcaagatcatgtcactgcactccagcctgggagacagagtgagaccttgagactttgcatcagaaacaaaacaaaacaaaacaaataaacaaacaaacacgttctggaagtagtatgaatggtaggttgagagatgagggtaaattcaattgagaaagggatgcaaatgagaacataattattagtaatctaaaagagaaatggtgaggggaaatttttaattaagataaagtaaaataatggtgaaatcatgaatttttttattttgtatttcatttttaaaaatcataaccacatgtacacttcattactttagaattggtacttttgaaagaaaaaatagtcatatncattgactctcaaatattcttatgagttatttatactaaatgaatgaaaaaggcagagaatacactntgtntaaatatgagcccaatttttaganccctttgttnaataggctaaanagncgatgggttaganattttagaaaggatgngananatagaaaaacttngggctgggggnggggctccncctgnttcc

SEQ ID NO: 11307 - DNA, 726 bp, Homo sapiens
  misc_feature 3, 421, 426, 430, 431, 433, 440, 445, 451, 462, 470, 471,481, 493, 502, 535, 539, 551, 588, 592, 610, 641, 644, 645,656, 669, 677, 680, 682, 692, 696, 700, 715, 726: n = A,T,C or G
ggnatgctttctgagaagtcaccacttgtaatttcagatcacatacacctgaaggcattttatagttcctaaagttaacatgttagatcttttttttccaccccatgagggtctcactctcacccaggctggaatgcagtggtgtgattgtagcacactttggccaccaactcctgggctcaagtggtcctcctgctttggcctcctctgagaagctgggattactggtgcacaccaccacacctggctaattttttatttttttttatttttggaaatagggtatggctatgttgccttgggcccgtcatgaactcctagcctcaggtgaccctcccacctcaggcctcccaaagggttgggattacaggagtgagctactgcactgggccaacatgttaattttttttttttttttttngaaangganncncccaggnggaantgcaanggggcaatctnaatttcanngaatttttcncctcccgggttnaagcgattntccccctaaccctcctgagtagctgggattaanggcncctgccatcacnctgggttaatttttgttttttgacaaaaaggagtttncccntgtgggcaggggattggnctcccctcccccacctttccaaagggtgggnttnngggttaacccnaaccccctccccnccaaatgnaantntaatttgggntttntccngggggttgggggggnaaaaaaccttn

SEQ ID NO: 11308 - DNA, 256 bp, Homo sapiens
  misc_feature 5, 16, 17, 22, 43, 44, 50, 76, 118, 123, 151, 170, 184, 185,187, 188, 189, 192, 197, 225, 228: n = A,T,C or G
gggtnccgcttctagnncacgntactcgggtacgctgtggcannagaatncgcgtggacccgggctgtgagaattncgccatgaagcctacatcgtgccactgcacattcggaactgngcagntgagtgaaaactccctctcaggtacggntgggagaagacaacagaancggttcgggctgcnntnnnacnacatnaccggtactgctgcgataatactacatnatngtaccgctgccatattacgacagaaggg

SEQ ID NO: 11309 - DNA, 101 bp, Homo sapiens
  misc_feature 17: n = A,T,C or G
ctgcgagaagacgacangagggtacggctgcgagaagacgacagaaggggatccttttgtagttcatgagcgtgatgattgggtgttcatacgcttgtgtg

SEQ ID NO: 11310 - DNA, 524 bp, Homo sapiens
tctggccttgtgtctgtggcactgtagtgagggatggaactcttgggtgggatgtggtaattttggtcgttgcacccaggcctcttgtccgtttctggggaaagataaagacaaggtccatagtcaccctccctaatggtttatactctctctctcctttctttcacacacacacaccccccacacacatgcacagctctccatgcccagctcaccttctcaggctccaggccatcttccatctggtcaggcctcctcttgagtctcttcctgagagaggcagctgggaaggggccttaatcagaggtctcttcagttctatgttcccctttacttccaataggggggacctctgttgggaaaagagacccttaagacaatacccaggagcccaaatgtcccaagaacttcctgtcttggcccccagcctcaattgtcaacaccaccaccaagcactgagcaccacttgtgccaaaagctgaattatgtgccagacagcatgaacagaagtgaggacgtaacct

SEQ ID NO: 11311 - DNA, 751 bp, Homo sapiens
  misc_feature 1, 7, 578, 637, 673, 715, 725, 728: n = A,T,C or G
natcagnactttactgggagttaaacaacatgtgaaaacctccttagctgcgaccacattctttcattttgttttgttttgttttgtttttaaacacctgcttaccccttaaatgcaatttatttacttttaccactgtcacagaaacatccacaagataccagctaggtcagggggtggggaaaacacatacaaaaaggcaagcccatgtcagggcgatcctggttcaaatgtgccatttcccgggttgatgctgccacactttgtagagagtttagcaacacagtgtgcttagtcagcgtaggaatcctcactaaagcaggagaagttccattcaaagtgccaatgatagagtcaacaggaaggttaatgttggaaacacaatcaggtgtggattggtgctactttgaacaaaaggtccccctgtggtcttttgttcaacattgtacaatgtagaactctgtccaacactaatttattttgtcttgagttttactacaagatgagactatggatcccgcatgcctgaattcactaaagccaagggtctgtaagccacgctgctcttctgagacttncattcctttctgattggcacacgtgcagctcatgacaatctgtaggatacaatcagtgnggatttcactcttttcagtccttctgttaagattanacacccatacactggtaaagacgtttcttgaaagtttacttntgtaacttgntanggtatggataaagccattggagg

SEQ ID NO: 11312 - DNA, 200 bp, Homo sapiens
  misc_feature 5, 9, 15, 28, 32, 43, 45, 79, 81, 84, 86, 90, 95, 106, 109,118, 152, 163, 167, 174, 185, 192, 195, 197, 199: n = A,T,C or G
ggggnttgntgacangcttcatggctgnaatngctacctcttncnctaccgtttcttggaaatcccctctggcacttancntcncntccngatanctgaacgggcntgncctccaccncactaaatgcagcgtcctgcgatctcttcaaccnctcctttcctnaaanaccctcntcaagaactgnggccctnctntncnc

SEQ ID NO: 11313 - DNA, 783 bp, Homo sapiens
  misc_feature 1, 505, 601, 666, 672, 673, 681, 685, 687, 717, 719, 726,757, 764, 766, 773: n = A,T,C or G
nggatctgtttcaattttcctttgtcatttatacttgcatttgcctccttttaccctaaccaatttttttctctcatgtgcatatatgtattccctctttcccaacactgtcataattacttcaaataattattcaatcctatcactttcatttttagattttcctttttggggggaggaggattattttctttttaaaaatgttaacaaaatatttcaaacttgcagaatataaccaatatccatgatcctatctctcagaattaattttttaaagaaataaaaacatatatttggagtctcctttgtacttctttccaatcccattcttttccatccaccccaaatccatctactctcctgaaggtggtgcatattattctttttaccatttgtactcttatttatgtgtgctacaaacaatacatttttgtgggttttaacatttgcataaatttgaatatatcctgcatatgattcttcaacttggtttttcctttattgngttttggaaatgtgtctatattgataaatttatatttagctcattgatttaaactacacatggcattacatcacatgattatatcagtatcctttncccaccgatggatgttaatacattactcattttttaccattatgaaaaatttctgtgggcgtggnggctcnncctgtatnccancnctttggagtccaggcggcagatacttgagncnggagtcncctgacacatgggaacccctctttctaagtntaagtancnggggggnggccagcctt

SEQ ID NO: 11314 - DNA, 464 bp, Homo sapiens
cggcacgaggcttccctacctcacctgatggtatccaccgaagggcatttcactaccattaatggtgagtaataaaatcctccgtgttcattcagacctcactgcgtcactactttgaacgcctctgtaagctgtgtcttcactcgccccgaggtgggtggagggaggcctctcactctgcttcgagtcctggtcttaaaggtagtcagaggcagaggctggattaaacacacactgtttaccaagtgccactctcagaccacctgagagacggggggccatcagtaaaattaagaagaatttttttcccttgttcgtgtatgttctgctgatccgtggcctgaaggttcctagagacgtcaagaaatgaatatcttacactgtgattctgtgaagaaagactggtaacccaaaactctcttctctaatgtattttttaacgaaaatgacaatatttctttaat

SEQ ID NO: 11315 - DNA, 522 bp, Homo sapiens
gcggccgctcgttgatcctctgtgggagccgctccagcagccccacggcacgtaccggcacaggaaggacagccactcgagcagaaagcgccgggtcttctccacgccctgcgtgtccgagccccagtgctccaggccgtagttggtgaagtcccgcaggatgtccaggcgctcggacgacgagatgtcccagtgccgctgctccttgatctccgtgaagagccacggcttgagcagggcgccacgggcaatcatgatcccggtgacaccagtctgcatggcgcggttggcatcctcaaatgacaagatgtccccatttccgaacaggggcatggggctggcggcctgcacgcactcctcgatgtactgccagtcggctagcttggtgtagcgctgctcccgagagcggccgtggagctgggggagaagccgccacgcagggtaggaggcagagagtgagacgcagagaggaagagaccaagagagccaggcgtgacgagtgccacgccccagtcccgcagc

SEQ ID NO: 11316 - DNA, 96 bp, Homo sapiens
accccccaaaagggggaccgttggattttttggcctttcaattggcccttttggaaggaacccccaccacaagggggggccaggttttaaaaccca

SEQ ID NO: 11317 - DNA, 513 bp, Homo sapiens
gctgtcttccatctttctcgctcgaatttctctcattaaatcaaaaaataccttgtcaacattagctcgtgttttagcagatgtttccacgtagttaacattccactgctcagctctgttttttgcctcttctacagaaacctgtcttttatcttctaaatctgatttgttaccaaccagtagaaatggaacattctcatcttcttttactcttaaaatctgctccctgaagtcagctgtagctgcaaaggattccatttctgtaatagagaaaacacagaggaacccctccccacttcggaagtagttgtctctaattgcagcgtagtcctcctgcccagctgtatctaagatatcgatctggacttcctccccatctagcactaccttcttccgatagctgtctgctttggtaggctcatagtcctccacaaactcatcgtacatgaactgtagagtcagagctgacttgcccacgccaccactgcccaccatgatgactttgtgtaaagc

SEQ ID NO: 11318 - DNA, 428 bp, Homo sapiens
acaaacaaaatcctattgtatgagcaacacattgttcaactgccagtcagaccaactgctgtaaagaacttatatcaaagtgagaagccacaaaaatggagagtggaaatatatagtgggcaaaaaaagattaatacagtgtggcaactgagtgacagctcacccatagaccatgtgaattttcacaaacctgtatttttctgaattaacactaaacggtagcctggaagaaaggatattgctttactaacatggttacctgcagccaggtgcattacaagtgaagcgtcgctgatgaaatcctctataaggttactgggaggcgggaggcggccatcctgggtcatcagcatgcagacctctattgctgccacctaatggacgcttaataatctctggatacttgtaaattctgagatgcatttgtg

SEQ ID NO: 11319 - DNA, 428 bp, Homo sapiens
ggtatccaagcaggagttactggagctctttaaggagctacacactgggagaaaggtgaaagatgggcaacttacggtcggactggtgggctaccctaatgttggtaagagttcaacaatcaacaccatcatgggcaacaagaaagtatctgtgtctgccacacctggtcacacaaagcactttcagactctctatgtggagcctggcctctgcctgtgtgactgtcctggcttggtgatgccatcttttgtgtctaccaaggcagaaatgacttgcagcggaatcctcccaattgatcagatgagagatcatgttcctcctgtatcactaatatcctttctgctttggaaacactctagttattacgtgcatattagggcttcaggtttattttgggcatttgagggattcagatttgatgaagaat

SEQ ID NO: 11320 - DNA, 577 bp, Homo sapiens
taccacttgccatcctcccagggacacaaggatcgagtccagggacctccctgaaaggcctcagtgccgcccccaccggaagacctttatgccatcattagtggttaagaagcaacgagcaaaaaacctttctgtacgctgagacctctcggtgcacctggtgaccctgggtggaggggacttgctgtgaagtcttcctcgccctctgccctcttgctgcttctccacattgccaggaaaagctgctgacgcctgccctcctctcttgagtcgagggctgaatctttctcctctaagcagtctggtcaggaaccttggtttcttgagaggcccccaagatgccgcagctccagggctcttcctcctcaccagaaatccctgggcttccacaatgtgaactcactcattgtcaggtgtccgtggagtgtttttggcatggtgacctgtctgggcccagcatgttgcagatgtgtatttatgcgcaatggtatgcatatctctgtgtgactgtcagtgttgcaagctggctggatccaactatctcttctgaaataatgcatccaaagggttgatattc

SEQ ID NO: 11321 - DNA, 573 bp, Homo sapiens
agaaccaggcagcccagaaaccccaggcgtggagattgatcctgcgagggaagggggttcatcatggcggatgacctaaagcgattcttgtataaaaagttaccaagtgttgaagggctccatgccattgttgtgtcagatagagatggagtacctgttattaaagtggcaaatgacaatgctccagagcatgctttgcgacctggtttcttatccacttttgcccttgcaacagaccaaggaagcaaacttggactttccaaaaataaaagtatcatctgttactataacacctaccaggtggttcaatttaatcgtttacctttggtggtgagtttcatagccagcagcagtgccaatacaggactaattgtcagcctagaaaaggaacttgctccattgtttgaagaactgagacaagttgtggaagtttcttaatctgacagtggtttcagtgtgtaccttatcttcattataacaacacaatatcaatccagcaatctttagactacaataatacttttatccatgtgctcaagaaagggcccctttttccaacttatactaaagagc

SEQ ID NO: 11322 - DNA, 140 bp, Homo sapiens
caagctacttgttctttttgcaggatcccatcgattcgaattcggcacgaggggattaacaatgctgaaggactcttagtagtagtgactgtgatctgtgcccctctgactttcctgagcctgacacacaacctgtgggc

SEQ ID NO: 11323 - DNA, 186 bp, Homo sapiens
  misc_feature 4, 6, 18, 25, 40, 51, 59, 61, 72, 74, 86, 88, 106, 113, 117,129, 133, 136, 151, 173, 174, 176: n = A,T,C or G
ggtncngctgcttataanacgacanaatggttcggctgcnataatacgacncaatggtncngctgctataanangactgaagggtncngctgctataagacgacanaatggtnctgntgctataatacnacanaanggttcggctgctatnaaccacttaatggttccgctgnnanaatacgacat

SEQ ID NO: 11324 - DNA, 864 bp, Homo sapiens
  misc_feature 5, 23, 35, 46, 48, 64, 65, 77, 79, 100, 705, 785, 804, 805,823, 828, 847, 848, 850, 862: n = A,T,C or G
ataanttgaccaaacgataaaancttgtcttgttncttttggccgnancggcctacggctgcgnntagtacgacagnangggagctttcctcatgcaaangattttgtatccccggcctacttgaagaagtggtcagctaaaggaatccaggttgttggttggactgttaatacctttgatgaaaagagttactacgaatcccatcttggttccagctatatcactgacagcatggtagaagactgcgaacctcacttctagactttcacggtgggacgaaacgggttcagaaactgccaggggcctcatacagggatatcaaaataccctttgtgctagcccaggccctggggaatcaggtgactcacacaaatgcaatagttggtcactgcatttttacctgaaccaaagctaaacccggtgttgccaccatgcaccatggcatgccagagttcaacactgttgctcttgaaaatctgggtctgaaaaaacgcacaagagcccctgccctgccctagctgaggcacacagggagacccagtgaggataagcacagattgaattgtacagtttgcagatgcagatgtaaatgcatgggacatgcatgataactcagagttgacattttaaaacttgccacacttatttcaaatatttgtactcagctatgttaacatgtactgtagacatcaaacttgtggccntactaataaaattattaaaaggagcactaaaggaaaactgtgtgccaagcatatcctaaggctacggaattggggaaccncatgcatccatgaggcttnntgtcagcaccaaatgganggagnctgaccatgaggattatanntntgataaaactgnac

SEQ ID NO: 11325 - DNA, 692 bp, Homo sapiens
  misc_feature 505, 567, 586, 614, 624, 632, 633, 646, 647, 653, 656, 657,664, 681, 689, 690, 691: n = A,T,C or G
aggggagcatgcgctccggctccaccacgaacatgtagtagaggttccacatcagcatcgacagcagtggcagaaacgtcaggccgtagccgaagcctcggaaggagcggcccacggcaaagagacatggtcttgctatgttgccagtctgggctcaaacttctggccttgagtgattctctcacctcagactcctgagtagctgggattacagatgcgggccaccacacctggctgtacaaactttaaaatgtttgagcaaattcaatgagtatagtaaaatatcttcctccctttaccgattcccaccctattctcccccacccccaccccaggcatcaatattatggtttcttgtgcactgagtgattttttaaattattattatttttttatttttgagacagagtctctctctgtcacccaggctggagtgcagtggtgcgatctcagctcactgcaacctccgcctcccgggttcaagcaattctcctgcctcagcctnctgagtagctgagactacgggcgcccgccaccatgcctggcttttttttgtatttttagtanagatggggtttcacccganatggtctcatctcctgacctgagatccncctgccttgnctcccaanngctggatacagcnngagccnccnnctggctntttttttttttttaatntaaagggnnnt

SEQ ID NO: 11326 - DNA, 489 bp, Homo sapiens
  misc_feature 139: n = A,T,C or G
ctggtaccggtccgggattcccgggatatcgtcgacccacgcgtccgggcggcgtttggatgattgtctctcggcggcggagtcggtgagcggcccggcggggcgcggggtgcggagcgggggcggctgtgcgtgcganagtggcaggtaacactgtggtgacactatctctgtcatgcatcaaacttataaaattggctgggcatggtggtgcatgcctgtaatcccagctacttggaaggctgaggctggagaatcacttgaatccaggagacggaggttgcagtgagcagagattgcaccactgcactccagactgggcaacacggcaagactccgtctccatagaaacaaaaaaacaaaacttacatatgtgtataagcctgtgtcaggattctgtacttttccttttatctacaggttgcatatttatatttcttcagtaatatatgctgtttcaagtactacagctttatattaagccttatt

SEQ ID NO: 11327 - DNA, 82 bp, Homo sapiens
tgacactataggaacaagtttgtacaaaaaacaggctggtaccggtccggaattcccgggatatcgtcgacccacgcgtccg

SEQ ID NO: 11328 - DNA, 437 bp, Homo sapiens
acaagtttgtacaaaaaagcggctggtaccggtccggaattcccgggatatcgtcgacccacgcgtccgcccacgcgtacggtggggaacatgtctgagtcggagctcggcaggaagtgggaccggtgtctggcggatgcggtcgtgaagataggtactggttttggattaggaattgttttctcacttaccttctttaaaagaagaatgtggccattagccttcggttctggcatgggattaggaatggcttattccaactgtcagcatgatttccaggctccatatcttctacatggaaaatatgtcaaagagcaggagcagtgacttcacctgagaacatcccagcgggaggacaagagaaatcatgtttattcctcaggaatactgaagtgccctggagtaagctgccattcttctgtaacaatgttatcagt

SEQ ID NO: 11329 - DNA, 323 bp, Homo sapiens
  misc_feature 286: n = A,T,C or G
ttttgctgtgaaaatactctgtttattaaagaccaggcggagggaggtaaggttgtgggttctgtatgggaaactgagtcccagccccagggagggagaaggaggacggaccagctggcagcctgcgagaggtcacaggtcagtggccggaccccagtcatagccgtcttcatcggaggactccgcatcatggactcgcgtaaactttttcttcagggcttcccgttcataggttcgcatgctgtcctgtcgccactgtcccctggggtggcggctgtccacctgngccccctgatgagccgagattctcccacgatccctcg

SEQ ID NO: 11330 - DNA, 672 bp, Homo sapiens
ctatttaggtgacactatagaacaagtttgtacaaaaaagcaggctggtaccggtccggaattcccgggatatcgtcgacccacgcgtccgcccagccttgggattcccaagtgttttcattcagtgatcgggactgaacacagaggactcaccatggagtttgggctgaattggattttccttgccgctattctaaaaggtgtccagtgtgaggtacagctggtgcagtcggggggaggcttggtcaagccgggggggtcccttagagtctcctgtgcaccctctggaatcgctctcaataacgcctggatgggttgggtccgccaggctccagggagggggctggagtgggtaggccgcattagaagcaaaggcgaaggtgagaaaacagactacgctgcatccgtcaaagggagattcaccatctcaagagatgattcaaggaacaagttggacctgcaaatgaacaccctgaaaaccgaggacacagccgtctattactgcaccaacctacctccttatgatagtagtggccattactactttaccgagtggggcaggggaaccctggtctccgtctcgtcagcttccaccaagggcccatcggtcttccccctggcgccctgctccaggagcacctctgggggcacagcggccctgggctgcctggt

SEQ ID NO: 11331 - DNA, 523 bp, Homo sapiens
  misc_feature 12: n = A,T,C or G
atgtgttggcgngcaggtagaggcgctccaggttggtgaggttgccgatctggatggggatgtaggcgatgtggttgtaccacagcttaaggcaggtgaggcggtgcaggtgctggaagctgatgatctcctcgatggtcttgaggttgttgtccttgaggtcaatctcctgcaggttgtggaggctgaaaatggagtgggggatgcgctccaggtcacagcggatcagctccagctcagtcaggttcgccatcttcttgaggctgttgaggacgatgagcttggtgccctcattgttgatggacagcttctgcaggtgcacgcccacatctgtgaccacctgtggcagcttgcttaggttgctcttgagccgcagcaccttgaggcgtttgagctcccgcagcccgtcgatgacgatgtagcggttgttctccgcgctcaggttgcccgtcaagtgcagctccttcagtgtcttcaagctatagatccacagcgggatcttccttgtgtcggtgaacttgat

SEQ ID NO: 11332 - DNA, 59 bp, Homo sapiens
agtttgtacaaaaaacaggctggtaccggtccggaattcccgggatatcgtcgacccac

SEQ ID NO: 11333 - DNA, 527 bp, Homo sapiens; identical to SEQ ID NO: 3022

SEQ ID NO: 11334 - DNA, 594 bp, Homo sapiens; identical to SEQ ID NO: 3023

SEQ ID NO: 11335 - DNA, 517 bp, Homo sapiens
cccacctcacctctggcacctctgagcatccacgtacttgcaagaactcttgctcacatcagctaagagattgcacctgctgacctagagattccggcctgtgctcctgtgctgctgagcagggcaaccagtagcaccatgtctgtgactggcgggaagatggcaccgtccctcacccaggagatcctcagccacctgggcctggccagcaagactgcagcgtgggggaccctgggcaccctcaggaccttcttgaacttcagcgtggacaaggatgcgcagaggctactgagggccattactggccaaggcgtggaccgcagtgccattgtggacgtgctgaccaaccggagcagagagcaaaggcagctcatctcacgaaacttccaggagcgcacccaacaggacctgatgaagtctctacaggcagcactttccggcaacctggagaggattgtgatggctctgctgcagcccacagcccagtttgacgcccaggaattgaggacagctctga

SEQ ID NO: 11336 - DNA, 380 bp, Homo sapiens
  misc_feature 63, 180, 192, 241, 242, 245, 246, 248, 250, 266, 267, 274,278, 337, 366: n = A,T,C or G
actgaaaagaagatagtgccatttgaaacaacagatgcatcttttatacattttcacaagttngtttttcatatttttaaaggccccatttatctgtaacagtggtatttttatttagagtatcggctacttaatatatacatgcaacaatatatgctttaatagtcatttaacttttangaatatttcatnacattaagtggttaagcatagcgttaaaagagtggaatataaggaatannaanntntngaaaatacgctgctannttcattngcanactatagtagaatggagatgcccataaaagtgatcattgcccaactgaattcctacccngaactaacatgtgattctcaagtgggganaaatattattaaaa

SEQ ID NO: 11337 - DNA, 506 bp, Homo sapiens; identical to SEQ ID NO: 3025

SEQ ID NO: 11338 - DNA, 365 bp, Homo sapiens; identical to SEQ ID NO: 3026

SEQ ID NO: 11339 - DNA, 632 bp, Homo sapiens; identical to SEQ ID NO: 3027

SEQ ID NO: 11340 - DNA, 710 bp, Homo sapiens
  misc_feature 475, 574, 581, 606, 617, 638, 706: n = A,T,C or G
tgccctaacccctgggatgcagcctgcctttccataaagtcacctaggtgaggataggcgcgggagcctcggcatgacaccatggagatcggggccctcttcccagtgggttcactccttttcacacctgctgggtccctcctcacccagcaggcctggtccacctctcattgcaagccccaagcactgagccagcaggtgccagggagccacccgccccccatagcttctgcacacctcagactcaccccatcaccttggcagcaaagcactggctctgccgtctgacccctgatccaggcagccccctccgcagagaaaagggttggggagaagcctctgcagtcctggaagatgtggggtgctgggtgagaggcatcagcccccacaagtatgtttttgtgtcttaagatagcagtttactttgaaaaagtgaaaaaggcttccgggctgtcctctgcccagtgagatggangacgctagagaaagtgctgagtgtcccgagagaggcccccgaccagtgcatggaggtccttcgcctggctcagctgggctgcaggatgcccactttgangaaggangcacaaggcttgggccaaggggcanaaggccatcanaacttgcccggcttttttggnaaacttgaggaccccaaccaactaaccacgtttacacgaacttgagtttttgaaccccgatttaatgncttg

SEQ ID NO: 11341 - DNA, 403 bp, Homo sapiens
cgttgctgtcggcgcggagaggagaggcctcgggatgtctctggcagatgagctcttagctgatctcgaagaggcagcagaagaggaggaaggaggaagctatggggaggaagaagaggagccagcgatcgaggatgtgcaggaggagacacagctggatctttccggggattcagtcaagaccatcgccaagctatgggatagtaagatgtttgctgagattatgatgaagattgaggagtatatcagcaagcaagccaaagcttcagaagtgatgggaccagtggaggccgcgcctgaataccgcgtcatcgtggatgccaacaacctgaccgtggagatcgaaaacgagctgaacatcatccataagttcatccgggataagtactcaaagagattccct

SEQ ID NO: 11342 - DNA, 750 bp, Homo sapiens
  misc_feature 24, 668, 710, 713, 727: n = A,T,C or G
ctagatcagctctttcaaatatgnaggatccctcgattcgggctctgcttttaaagatatggctgcttcaaaggccagagtcacaggaaggacttcttccagggagattagtggtgatggagaggagagttaaaatgacctcatgtccttcttgtccacggttttgttgagttttcactcttctaatgcaagggtctcacactgtgaaccacttaggatgtgatcactttcaggtggccaggaatgttgaatgtctttggctcagttcatttaaaaaagatatctatttgaaagttctcagagttgtacatatgtttcacagtacaggatctgtacataaaagtttctttcctaaaccattcaccaagagccaatatctaggcattttcttggtagcacaaattttcttattgcttagaaaattgtcctccttgttatttctgtttgtaagacttaagtgagttaggtctttaaggaaagcaacgctcctctgaaatgcttgtcttttttctgttgccgaaatagctggtcctttttcgggagttagatgtatagagtgtttgtatgtaaacatttcttgtaggcatcaccatgaacaaagatatattttctatttattattatatgtgcacttcaagaagtcacttgtcagagaaataaagaattgncttaaatgtcatgattggaaaatgtcctttgcattgcttggnaangggtgtacctaaanccaggaaaatggctctggtttgg

SEQ ID NO: 11343 - DNA, 349 bp, Homo sapiens
cccccaggactgtcagctccccttcccacagagcacccacctggaggtgtcacctgccggcaagcgtgggccattcatccacctgtcagtcaacaacacccgctgagcatcggcttgtatcaaaaggtccagacctaaggggaaattttatctctttctttctttctttcttttttttttgacacaaagttttgctcttgttgcccaggctggagtgcaatgacacgatctcggttcactgcaacctctgcctcctgggttcaagcgattctcctgcctcagcctcccgagtagctgggattacaggcgcccgccatcacgcccgggaaatttttttgtattgttggga

SEQ ID NO: 11344 - DNA, 579 bp, Homo sapiens; identical to SEQ ID NO: 3029

SEQ ID NO: 11345 - DNA, 513 bp, Homo sapiens
ttccgttgctgtcggggacttcagcatggcggtgtttgcagatttggacctgcgagcgggttctgacctgaaggctctgcgcggacttgtggagacagccgctcaccttggctattcagttgttgctatcaatcatatcgttgactctaaggaaaagaaacaggaaattgaaaaaccagtggctgtttctgaactcttcacaactttgccaattgtacagggaaaatcaagaccaattaaaattttaactagattaacaattattgtctcggatccatctcactgcaatgttttgagagcaacttcttcaagggcccggctctatgatgttgttgcaggttttccaaagacagaaaagctttttcatattgcttgcacacatttagatgtggatttagtctgcataactgtaacagagaaactaccattttacttcaaaagacctcctattaatgtggcgattgaccgaggcctggcttttgaacttgtctatagccctgctatcaaagactc

SEQ ID NO: 11346 - DNA, 342 bp, Homo sapiens; identical to SEQ ID NO: 3030

SEQ ID NO: 11347 - DNA, 209 bp, Homo sapiens
tgcaaactctagctgcagcatgtggagcttctatatgtttactaccttgaatggttgtcagtgtcactgaaccacaggggagaggagtatggggtacatcaatggtctgtgccaacgaatggtgagcttagggtcttactctgactccttactcctcaaggaggcagttagggtccctcttaagcaggcttctatgtcttaccactaaa

SEQ ID NO: 11348 - DNA, 663 bp, Homo sapiens
ctgtctggggccaaggttgccagagatttctgaagacacagcttgttccttgttcttggctggtgggtgcacaaggacttctggaagggatttagacggggctgagtgctaggattaaagtggggatgggagtacggcaacagaaaaacctgggagctagcaatgcacccagcccttgactgtgccctggtggacagccgagctgtggctctagcgtgagccagtgccttcctgtccctgccaagggtgaggccagagttggccccgaggctaatgtttcagtgggtgagattaggtcggccgtacagaggccggtgggctccctgacatcccttccaggcaacctgaaagcactgaaatagcttatggccctgtgccagggaccttggcccaagctgctgacctccagggtggggagggagctacccccaggagaagagtcactcagacagcagtatgagcaagccagccagcagctccgtgcctgcacccagctcaggggaatcccagggggttcagatgcccaggaaggaaaaggggacagcgctactgctatggaatgagaccaccacttctcctgttgtccttcccagcttctccccaacctccccttttccctagtttataagacaggagaaaagggagaaagcaaaaagctggaaa

SEQ ID NO: 11349 - DNA, 522 bp, Homo sapiens
tccgttgctgtcgcacgaacacagatagaaagaaggaaaacaagcctgtatttttccagcaaatataacacagaagctcttagccccccacgacgtaaagcctttaagaaatggacacctcctcggtcaccttttaatctcgttcaagaaacactttttcatgatccatggaagcttctcatcgctactatatttctcaatcggacctcaggcaaaatggcaatacctgtgctttggaagtttctggagaagtatccttcagctgaggtagcaagaaccgcagactggagagatgtgtcagaacttcttaaacctcttggtctctacgatcttcgggcaaaaaccattgtcaagttctcagatgaatacctgacaaagcagtggaagtatccaattgagcttcatgggattggtaaatatggcaacgactcttaccgaattttttgtgtcaatgagtggaagcaggtgcaccctgaagaccacaaattaaataaatatcatgactggctttgggaaaatcat

SEQ ID NO: 11350 - DNA, 363 bp, Homo sapiens; identical to SEQ ID NO: 3032

SEQ ID NO: 11351 - DNA, 105 bp, Homo sapiens
gaattccgttgctgtcggaagaattcgcggccgaggagtttttttttttttttttttcaccaaaccatggggagagctacaaaaggtatcctttcttattttcag

SEQ ID NO: 11352 - DNA, 511 bp, Homo sapiens
ttccgttgctgtcgccagcttctgccagcccctggcctttactttcttccttgcctatgcagggcaaacaaaatgtgaaattctgccctcagctgagctgagtaagggctcctgggggttggctggagatgggtgtggcatctgtccaggcctggaaccgtctcaagacagtgctggcaaagctgcagtattgagatgctaaggagctgatgccacctctttgtcttcccctaaaggagaacatggggataacatgggtgtgtgcccacaacactctaggtgcagagcccctgtggcaaagtattacagggtgtgggtggggattaccctgaatcggggattttaatgatggaagcaggcagagcctggtgggtgattctgtcaacagaaaattgcaatcatgcaggggctgggagggttaggatgaaaaaactggggccattggaggcccactgtaggtgggagggagctgattttggggtggggggtgggactagagggcaatactgaa

SEQ ID NO: 11353 - DNA, 384 bp, Homo sapiens
gtcggatccattcagtcacggttcctgcagagtctgaatctaaactgtatagcactatgtgaagtgattacatctaaggacctgcacaagcatgggaacatctgggtgtgccctgtgtcctaccatgtctgcacaagattcttctttgtatatgatgatggacacgtgggctatgccaacattaatactcaggaccccaagatacagaatgaaatcatgcgtgtgatcggaactcaggtttacacaaactgacggggcccgatccctcgtaccacccctgttaccccaggatccatctgccctcataaaagtgttcaagtacagcagctgaggctgccctgaggaatcaaggggccattaccaatgggcaggaaaaggatatgt

SEQ ID NO: 11354 - DNA, 405 bp, Homo sapiens
cgttgctgtcgaagcggctccgtgacggagcggcggtgcgcgcggcagggcccggagtatcccgctttctttggaggaaaccaccgcatcagatctgcgctgcggcagaggcaggctacaaccactagcacggctgacgatggccctttctgcggagaccgagtcacacatctaccgagctctgcgtactgcttctggcgctgccgcccaccttgtggccctgggctttaccatctttgtggctgtgcttgccaggcctggctccagcctgttctcctggcacccggtgcttatgtctttggctttctccttcctgatgaccgaggcactactggtgttttctcctgagagttcgctgctgcactccctctcacggaaaggccgagcacgctgccactgggtgct

SEQ ID NO: 11355 - DNA, 300 bp, Homo sapiens
aattccgttgctgtcggaaacaggcctgaggtcacatttcacttagtggttgtgttgggaccaaaacctgggtgtcctcactgctgccctgagtccagccatggttttcagggggacagtggacagggactcagaaatgtggtgggagggcctccctggcttgggagaccgctctctgcaagggagggggagagaagcagagggagagagaaggtgacacggatggaagagtgggaaggagctggcctggctcagccctaggctgtccctgcagccagggtgtccgggggctggccagtc

SEQ ID NO: 11356 - DNA, 354 bp, Homo sapiens
tgccggtggagcccgagtctgactccggggacgaggaagaggaggggcccattgtgctgggcagacgacaaaaagctttggggaagaaccgcagtgctgatttcaaccctgatttcgttttcactgagaaggaggggacgtacgatggcagctgggccctggctgatgtcatgagccaactcaagaagaagagggcagccactacattagatgagaagattgagaaagttcgaaagaaaaggaaaacagaggattaagaagccaagtctgggaagttggaaaaggagaaagaagcaaaggaaggctctgaaccaaaggagcaggaagaccttcaagagaatgatgaggaaggct

SEQ ID NO: 11357 - DNA, 368 bp, Homo sapiens; identical to SEQ ID NO: 3033

SEQ ID NO: 11358 - DNA, 529 bp, Homo sapiens
gtgggagagtcagaactaagggaatgagtatgggcggcccctcataaaggaccttaaaggcagggaacagcaatgccaaatttccctctctcgtgagatgggggatgctgtgcaggctgctgaggcacccatgagaaacgccgaaagagcatgcatcttacaaatagcccctcaattccaggagtcaacatgccatacaatgaggctggagacaggtagctccgagggaggacttctggcatgagatctcggcatggcaagcccagcatcgcctcatcccagacaggctccaccaggagatcaagcaagggctgcctttcaggagtcacctcctgagccacttgatagttctggaagtgaccaccgaccacggtggaggaatagactactagttcattctgggacacttgatccagagagtagaaagcttggaaagaccagataagacacctgccctttgtctgcctaaggacatgagacaccacattccatatgtgctagaaaaacctatccactgatgagtctaact

SEQ ID NO: 11359 - DNA, 664 bp, Homo sapiens
  misc_feature 496: n = A,T,C or G
aggtgcctgcgctggggcctgagccgagccggagtctggctgctcccaccgcccgcacggtgcccacgccgggcgctgcacaagcagaaagacggcactgagttcaagagcatctacagcctggacaagctctaccccgaatctcagggctcggacaccgcctggagggtcccgaatggtgcaaagcaagccgacagtgacatccctctagatcgcttgacaatatcttattgtcggagtagtggtcctggggggcagaatgtgaacaaagtgaattccaaggcagaagtcaggttccatttggcaactgccgagtggatcgcggagcccgtgcggcagaagatagccatcacgcataaaaacaagatcaacaggttaggagagttgatcctcacctctgagagcagccgctatcagttccggaatctggcagattgcctgcagaaaattcgagaaatgatcactgaggccagccagacaccgaaggagccaacanaagaagatgttaaacttcatagaatcaggatagaaaacatgaatcgggaaaggctgagacaaaagagaattcattctgctgtaaagacaagcaggaagggtcgacatggactgaaatcaccctctgcagctgggagggctcttctggggcgtccgggcagctgcagct

SEQ ID NO: 11360 - DNA, 591 bp, Homo sapiens
gtccccgccatgtctgcggccatgagggagaggttcgaccggttcctgcacgagaagaactgcatgactgaccttctggccaagctcgaggccaaaaccggcgtgaacaggagcttcatcgctcttggtgtcatcggactggtggccttgtacctggtgttcggttatggagcctctctcctctgcaacctgataggatttggctacccagcctacatctcaattaaagctatagagagtcccaacaaagaagatgatacccagtggctgacctactgggtagtgtatggtgtgttcagcattgctgaattcttctctgatatcttcctgtcatggttccccttctactacatgctgaagtgtggcttcctgttgtggtgcatggccccgagcccttctaatggggctgaactgctctacaagcgcatcatccgtcctttcttcctgaagcacgagtcccagatggacagtgtggtcaaggaccttaaagacaaggccaaagagactgcagatgccatcactaaagaagcgaagaaagctaccgtgaatttactgggtgaagaaaagaagagcacctaaaccagactggat

SEQ ID NO: 11361 - DNA, 578 bp, Homo sapiens
gccgggcaccgcggccatggagggtcaacgctggctgccgctggaggccaatcccgaggtcaccaaccagtttcttaaacaattaggtctacatcctaactggcaattcgttgatgtatatggaatggatcctgaactccttagcatggtaccaagaccagtctgtgcagtcttacttctctttcctattacagaaaagtatgaagtattcagaacagaagaggaagaaaaaataaaatctcagggacaagatgttacatcatcagtatatttcatgaagcaaacaatcagcaatgcctgtggaacaattggactgattcatgctattgcaaacaataaagacaagatgcactttgaatctggatcaaccttgaaaaaattcctggaggaatctgtgtcaatgagccctgaagaacgagccagatacctggagaactatgatgccatccgagttactcatgagaccagtgcccatgaaggtcagactgaggcaccaagtatagatgagaaagtagatcttcattttattgcattagttcatgtagatgggcatctctatgaattagatgggcggaagc

SEQ ID NO: 11362 - DNA, 581 bp, Homo sapiens
agccctgtcaaccagctccgagccggcagcgaaacctgaagtggaccctgtggaaaatgaagctgtcgccccagaattcaccaaccggaacccccggaacctggagcttttatctgtagccaggaaagagcggggctggcggacggtgtttccctcccgtgagttctggcacaggttgcgagttataaggactcagcatcatgtagaagcacttgtggagcatcagaatggcaaggttgtggtttcggcctccactcgtgagtgggctattaaaaagcacctttatagtaccagaaatgtggtggcttgtgagagtataggacgagtgctggcacagagatgcttagaggcgggaatcaacttcatggtctaccaaccaaccccgtgggaggcagcctcagactcgatgaaacgactacaaagtgccatgacagaaggtggtgtgggtctacgggaacctcagagaatctatgaataaatggaagcattaattggtttgaacatgtaaatataaatctgtcagccactacagccatcaaaagagagcatctggaagaacagccagcttggaagttttacag

SEQ ID NO: 11363 - DNA, 248 bp, Homo sapiens
ccggggtaaaaaatgtaccccattttttgccacctaatgggctacaccttgacctaacgtctttacgggggtacttgcgcttactttgtacccttcataagggtttgctgaaaatggcggtttttaggctgaccaaaagggggggaggttgatcggggtttatcaattacaaaacaggctcctctaaagggatataaaccccccccaggccctttgagttttaacctggggctcgaagggttctggca

SEQ ID NO: 11364 - DNA, 505 bp, Homo sapiens
ccgttgctgtcggtaacttgcaaaaagtagacttggtgtgaagactcacttctcagctgaaattatatatatacacatatatatatatattttacatctgggatcatgatagacttgttagggcttcaaggccctcagagatgatcagtccaaatgaacgaccttacaaatgaggaaaccaagataaatgagctgccagaatcaggtttccaatcaacagcagtgagttgggattggacagtagaatttcaatgtccagtgagtgaggttcttgtaccacttcatcaaaatcatggatcttggctgggtgcggtgcctcatgcctgtaatcctagcactttgggaggctgaggcaggcaatcacttgaggtcaggagttcgagaccagcctggccatcatggcgaaacctcatctctactaaaaatacaaaagttaaccaggtgtgtggtgcacgtttgtaatcccagttactcaggaggctgaggcacaagaattgagtatcac

SEQ ID NO: 11365 - DNA, 603 bp, Homo sapiens
ccgttgctgtcggctcctggccccttggctggccgggctgtttctggccatgggtcgctcccgccggacaggcgcgcaccgagcgcactctctagcccggcagatgaaggcgaagcggcggcggccggacttggatgagattcaccgcgagctgcggcctcagggatccgcacgaccccagcccgacccaaacgccgagttcgaccccgacctgccagggggcggtctgcaccgctgtctggcctgcgcgaggtacttcatcgattccaccaacctgaagacccacttccgatccaaagaccacaagaaaaggctgaagcagctgagcgtcgagccctacagtcaggaagaggcggagagggcagcgggtatgggatcctatgtgccccccaggcggctggcagtgcccacggaagtgtccactgaggtccctgagatggatacctctacctgacatggcctgaagatgcagggcagaggaattgcccatggacagtgacgcaaggactaggctgggagggagcgtgccaaccccttttgcctctgggtttggggagcggagggcctcttcttggtgccctgcccccaataaaggaactggac

SEQ ID NO: 11366 - DNA, 396 bp, Homo sapiens
ccgttgctgtcgctatccttcagagcaagaaaaagcgttgctgtcccagcaaacacacctgtctacgctacaggtctgtaactggttcatcaacgcccgccgcaggctcctccctgacatgctgagaaaggatggcaaagatccaaatcagttcacaatttcccgccgtggggccaagatttctgaaacgagctctgtggagtccgtgatgggcatcaaaaacttcatgccagctctagaggagaccccatttcattcctgtacagctgggccaaacccaaccctagggaggccactgtctcctaagccgtcatccccgggatcagttttggctcgtccatcagtgatctgccataccactgtgactgcattgaaagatgtccctttctctctctg

SEQ ID NO: 11367 - DNA, 422 bp, Homo sapiens
ttccgttgctgtcgcttaatccaatgggtttttccctgtacagtagattttccaaatgtaataaactttaatataaagtagtcctgtgaatgccactgccttcgcttcttgcctctgtgctgtgtgtgacgtgaccggacttttctgcaaacaccaacatgttgggaaacttggctcgaatctctgtgccttcgtctttcccatggggagggattctggttccagggtccctctgtgtatttgcttttttgttttggctgaaattctcctggaggtcggtaggttcagccaaggttttataaggctgatgtcaatttctgtgttgccaagctccaagccccatcttctaaatggcaaaggaaggtggatggccccagcacagcttgacctgaggctgtggtcacagcggaggtgtggagccg

SEQ ID NO: 11368 - DNA, 462 bp, Homo sapiens
tactggactggaagcaggagacagaacagtgtctgtcccggggtgacttcatcaggagaccgcccacatagagctggaccccgcagctgaagcggaaatgtgagacaggctggcacctccggaaaaactgcctttcagccttggtgttccgtgcaaggtgaaaagaaataggtcctcccagtttacagcttgaaatcaggctagtgagtggccctggagaccacgaggggagaatttaaaggccccggctggcagggtctaggtggctggcagaggcacatgcagaccctgcctggagcctgccctaggacgctgggcgggtcagtctccgtgcaggatgtgagcagcgtccctgggctctatccgcgaggtgccagtagcgtgtgcaggtacatacacgtgcgtgcacactgtgatgacacccggaaatgtctcacgatgttgaaatgtgtccttgggggc

SEQ ID NO: 11369 - DNA, 555 bp, Homo sapiens
ggcttgcctggcttggctgcagtgcactttgaaatgaagtatctgtcctttggcccagcccctggtttgcttgtagaaaacatggtaggcttccccaaggcatctgcagggaactttggcagcttggggcaccctgaattagcaaaaatggggggtgatgaggtgctgaagaaggatacttaacagcttagtgaggaggcaagagctcctctgggaccaccacttcttcaggagagggcctgtgggcttgcttttggaaggcctcaggcagacacgtgccctctgggtgatgtctgtctgctgccaggatggagcagaggagcgccacacatggaggaaagcccctgtaacgttacctaccttaaactccactcatcaaatctgagaaaagtatccactggtccccagggtttcagtcatgcttttgggggtcattgggtattagagaagtaagtatcttttctgagagagggggagtcaccccccctactggggattcctctgggctttattcactcccagccctggccctgacctttgtgggcctccctaatg

SEQ ID NO: 11370 - DNA, 338 bp, Homo sapiens
ggcacgaggtcaaaagctgtcgaaaccgttcacaatttgtgttgcaacgagaacaaaggggcctctgaactagtggcagaattgagcacactttatcagtgtattaggtttccagtggtagcaatgggtgtgctgaagtgggtggattggactgtatcagaaccaaggtactttcagctgcagactgaccatacccctgtccacctggcgttgctggatgagatcagcacctgccaccagctcctgcacccccaggtcctgcagctgcttgttaagctttttgagactgagcactcccagctggacgtgatggagcagcttgagttgaagaagacact

SEQ ID NO: 11371 - DNA, 376 bp, Homo sapiens
cgttgctgtcgatgctatttgcgttctccagatgtttattgaagatacagatcctaattggttacccagtttgaccctaatcatatgtatattttattgatttcagtttgcaatttttaatttatgttcttatgatggtttaaacctatagtcaggcttttaagtacaagtttgtttaagtgccagactttgaggatcagttttaatttctccatttgtaatagctgggtatttaaactggaagcaaatagttttctttcttaacaattatgtgcagtgtgtgtcactgttttcttgctttatagatagagctggctttaagtgctaaaggacacagtagatttttgacaaacagtggctgctctgctgactatct

SEQ ID NO: 11372 - DNA, 432 bp, Homo sapiens
attgtgtgtgccttttatgtcttgagaatttatatgtggaaaagacgacatctacttcaaactgtatttttttcgtttttttttttttttggggaaagggggaaaaacggggttttgctttgtcccccaggctggagtgcaggggcccaatctcagctaactgcaacctccacctcccgggttaaaggaattctccctcacccccccgagtagctaaaaccacaggggcgtcccaccacacccggctaattttttggttttttaagaaaaaacggggtttattaaaaacggatcactcctgaccacgtgatccccccccctgggcctccaaaagggctggaattacaggcgtgaccccccacccccggcctgtttttccaaaaaggaaaccttggggtttttgggggcccaaggggaaaaaaaatgtctttt

SEQ ID NO: 11373 - DNA, 501 bp, Homo sapiens
ttcacagtcaccaggcctttccaaggactcatcccaaagcctgatgaagatgacgccaacagactcggggagaaggtgatcctgcgggagcaggtgaaggaactcttcaacgagaaatacggtgaggccctgggcctgaaccggccggtgctggtcccttataaactaatccgggacagcccagacgccgtggaggtcacgggtctgcctgatgacatccccttccggaaccccaacacgtaccgacatccaccggctggagaagatcctgaaggcccgagagccattgtccgcattggtcatcattaaccagctccaacccttttgcagaaatctgcaatgatgccaaggtgccagccaaagacagcagcattcccaagcgcaagagaaagcgggtctcggaaggaaattccgtctcctcttcctcctcgtcttcctcttcctcgtcctctaacccggattcagtggcatcggccaaccagatctcactcgtgcaatggc

SEQ ID NO: 11374 - DNA, 546 bp, Homo sapiens; identical to SEQ ID NO: 3036

SEQ ID NO: 11375 - DNA, 462 bp, Homo sapiens
gacctgcaggacgaaaccatgaagagcctgatccttcttgccatcctggccgccttagcggtagtaactttgtgttatgaatcacatgaaagcatggaatcttatgaacttaatcccttcattaacaggagaaatgcaaataccttcatatcccctcagcagagatggagagctaaagtccaagagaggatccgagaacgctctaagcctgtccacgagctcaatagggaagcctgtgatgactacagactttgcgaacgctacgccatggtttatggatacaatgctgcctataatcgctacttcaggaagcgccgaggggccaaatgagactgagggaagaaaaaaaatctctttttttctggaggctggcacctgattttgtatccccctgtagcagcattactgaaatacataggcttatatacaatgcttctttcctgtatattctcttgtctggct

SEQ ID NO: 11376 - DNA, 300 bp, Homo sapiens; identical to SEQ ID NO: 3037

SEQ ID NO: 11377 - DNA, 374 bp, Homo sapiens
gatcacctgaggctgaggccgggggtttgagaccagcctgaccaatatggagaaaccccgtctctactaaaaatacaaaattagccgggagtggtggcgcatgcctgtaattccagctactcgggaggctgaggcaggagagtcgcttgaacccgggaggcggaggttgcggtgagccgagatcgcgccattgcactctagcctgggcaacaagagggaaaactccgtctaaaaagaataagagggttacaagtagcctgaattttcctctcttcaaatagggacttctcaaagaaggtgaatctataatagtggtgtagattcagatataaggacacgtatttggcgtaaaggagaggcaaagttagaggaac

SEQ ID NO: 11378 - DNA, 191 bp, Homo sapiens
ccccggctgcagttggatttttaaattgcttttttttattgttgaggtttttttatctccaagggactctcccggcacttctaccttccagagttacttcagtgcataaagtttgaattattttgttcttgtgggcagaagtgggaatgatggaatatcctcacggaaaaggcagtgaagttgggagtact

SEQ ID NO: 11379 - DNA, 400 bp, Homo sapiens
gttgctgtcgccatgctgtagaatttttgtcttaaaaagaccacatacccagcacccatgaaataaaagattcatctgtaattgggattcaaagtgattaaattcctttgttcatactcataaatagcactaaagtgttataacattttcatttacctatttttagttccttcattttaacttaataaaaatcttggattgatattctttttttttttttttttaaaaaggggtttttttttttcccccagggggggaaaaaagggtttttttttgggttaatggaaacccccccccccgggttaaaccctttttttttgcttaacccgccaaggggggggaaattaaggccccccccccccaccccggtttttttttttttttttttaaaaaaaaaggg

SEQ ID NO: 11380 - DNA, 465 bp, Homo sapiens; identical to SEQ ID NO: 3044

SEQ ID NO: 11381 - DNA, 488 bp, Homo sapiens; identical to SEQ ID NO: 3046

SEQ ID NO: 11382 - DNA, 381 bp, Homo sapiens
cctccatgtgtccactcgctctttgcacatcggctcccagctgtctcctgaacagggaagctcaggcacttgagatgctaggagacagacacattcaaattgcactgctaccagacactgacagggatcaagtatgaggttctagcagatcctaagcaagctggaatagattctcttctccgaaagatttatgagatttactcagactttgccctcaagaatccattctgttgcttatagatgcctatcaagtgtgagctctttgaccataacctgaagctagctctggaggtggaagagaatgctggaacttctggacctgggtcatatgctgaacctgttatggacccccaaaatctgagagttcctgcaacaagaata

SEQ ID NO: 11383 - DNA, 107 bp, Homo sapiens; identical to SEQ ID NO: 3048

SEQ ID NO: 11384 - DNA, 574 bp, Homo sapiens
tcacgccagagtgcggctgggatccggcggccacctgcacctgcgtatctctcgggccgcccttcccgaggggctccccgaggcctcccgccttcaccgggctctgttccggctgtccccgacggcgtcaaggtcgtgggacgtgacacgacctctgcggcgtcagctcagccttgcaagaccccaggcgcccgcgctgcacctgcgactgtcgccgccgccgtcgcagtcggaccaactgctggcagaatcttcgtccgcacggccccagctggagttgcacttgcggccgcaagccgccagggggcgccgcagagcgcgtgcgcgcaacggggaccactgtccgctcgggcccgggcgttgctgccgtctgcacacggtccgcgcgtcgctggaagacctgggctgggccgattgggtgctgtcgccacgggaggtgcaagtgaccatgtgcatcggcgcgtgcccgagccagttccgggcggcaaacatgcacgcgcagatcaagacgagcctgcaccgcctgaagcccgacacggtgccagcgccctgctgcgtgcccgccagctacaat

SEQ ID NO: 11385 - DNA, 406 bp, Homo sapiens
cgttgctgtcgctaatgtggacatatctaaaataaatgaagttcttacagcagctgtgacacaagcctcactgcagtctataattcataagtttcttactgctggaccatctgctttcaacataacgtctctgatttctcaagctgctcagctctctacacaagcccagccatctaatcagtctccgatgtctttaacatctgatgcgtcatccccaagatcatatgtttctccaagaataagcacacctcaaactaacacagtccctatcaaacctttgatcagtactcctcctgtttcatcacagccaaaggttagtactccagttgttaagcaaggaccagtgtcacagtcagccacacagcagcctgtaactgctgacaagcagcaaggtcatgaacctgtc

SEQ ID NO: 11386 - DNA, 447 bp, Homo sapiens
attccgttgctgtcgcttgttgtaaaaccaggttccaagacactgccagcaccgtatgtaaaagtgtatctattagataacggagtctgcatagccaaaaagaaaacaaaagtggcaagaaaaacgctggaacccctttaccagcagctattatctttcgaagagagtccacaaggaaaagttttacagatcatcgtctggggagattatggccgcatggatcacaaatcttttatgggagtggcccagatacttttagatgaactagagctatccaatatggtgatcggatggttcaaacttttcccaccttcctccctagtagatccaaccttggcccctctgacaagaagagcttcccaatcatctctggaaagttcaactggaccttcttactctcgttcatagcagctgtaaaaaaattgttgtcacagcaaccagcgttac

SEQ ID NO: 11387 - DNA, 450 bp, Homo sapiens
gttgcggggccatggcggggaccgcgctcaagaggctgatggccgagtacaaacaattaacactgaatcctccggaaggaattgtagcaggccccatgaatgaagagaacttttttgaatgggaggcattgatcatgggcccagaagacacctgctttgagtttggtgtttttcctgccatcctgagtttcccacttgattacccgttaagtcccccaaagatgagatttacctgtgagatgtttcatcccaacatctaccctgatgggagagtctgcatttccatcctccacgcgccaggcgatgaccccatgggctacgagagcagcgcggagcggtggagtcctgtgcagagtgtggagaagatcctgctgtcggtggtgagcatgctggcagagcccaatgacgaaagtggagctaacgtggatgcgtccaaaatgtggcgcgatg

SEQ ID NO: 11388 - DNA, 389 bp, Homo sapiens
gtggcggttgctatcgcttcgcagaacctactcaggcagccagctgagaagagttgagggaaagtgctgctgctgggtctgcagacgcgatggataacgtgcagccgaaaataaaacatcgccccttctgcttcagtgtgaaaggccacgtgaagatgctgcggctggcactaactgtgacatctatgaccttttttatcatcgcacaagcccctgaaccatatattgttatcactggatttgaagtcaccgttatcttatttttcatacttttatatgtactcagacttgatcgattaatgaagtggttattttggcctttgcttgatattatcaactcactggtaacaacagtattcatgctcatcgtatctgtgttggcactgata

SEQ ID NO: 11389 - DNA, 615 bp, Homo sapiens
ctggggctcttggcggctgggttctgccctgctgtcctctgccaccctaacagcccacttgacgaggagaatctgacccaggagaaccaagaccgagggacacacgtggacctcggattagcctccgccaacgtggacttcgctttcagcctgtacaagcagttagtcctgaaggcccctgataagaatgtcatcttctccccactgagcatctccaccgccttggccttcctgtctctgggggcccataataccaccctgacagagattctcaaaggcctcaagttcaacctcacggagacttctgaggcagaaattcaccagagcttccagcacctcctgcgcaccctcaatcagtccagcgatgagctgcagctgagtatgggaaatgccatgtttgtcaaagagcaactcagtctgctggacaggttcacggaggatgccaagaggctgtatggctccgaggcctttgccactgactttcaggactcagctgcagctaagaagctcatcaacgactacgtgaagaatggaactagggggaaaatcacagatctgatcaaggaccttgactcgcagacaatgatggtcctggtgaattacatcttctttaaa

SEQ ID NO: 11390 - DNA, 548 bp, Homo sapiens
gtaaaccaagtgtgtattcctgtgtatgaatttgtagaactgatttctgcttcaagagaagctgcacctttaattttataaggtcccctccacctgtaaccctataaatgtctgtaaataaaacactaaaatttgtagtgataggatcaatttgggaatatctgctgagagaccaaaaagttcatttttttaagtaccttggttaaagagtaaagattattcctcttattttttaaagaagaatgcactttaacaaacatagagctgcatgggcaattcaaacaaatctgtgaagtgcagtacccattcagaaatcacacttcctgaaaaccgttcaaaagcagagtccagacgggctgttgatctcactgcctgtaggttgaagctcagattctgatcaattttgagaggagcagggctgcttcaaaagagcaatgtgaatacagtcagaagcttcagactggtctgtaaaaatggcgggtcccgtatttaccactaactagcaaaactgacagaaaaactcacagagaaaaaatgtaagaatcctt

SEQ ID NO: 11391 - DNA, 520 bp, Homo sapiens; identical to SEQ ID NO: 3050

SEQ ID NO: 11392 - DNA, 523 bp, Homo sapiens; identical to SEQ ID NO: 3052

SEQ ID NO: 11393 - DNA, 543 bp, Homo sapiens; identical to SEQ ID NO: 3054

SEQ ID NO: 11394 - DNA, 598 bp, Homo sapiens
tggtgtgcctgggcctgagcagcatcgttggcgtctggtacctgctgaggaagcactggattgccaacaacctttttggcctggccttctcccttaatggagtagagctcctgcacctcaacaatgtcagcactggctgcatcctgctgggcggactcttcatctacgatgtcttctgggtatttggcaccaatgtgatggtgacagtggccaagtccttcgaggcaccaataaaattggtgtttccccaggatcttgctggagaaaggcctcgaagcaaacaactttgccatgctgggacttggagatgtcgtcattccagggatcttcattgccttgctgctgcgctttgacatcagcttgaagaagaatacccacacctacttctacaccagctttgcagcctacatcttcggcctgggccttaccatcttcatcatgcacatcttcaagcatgctcagcctgccctcctatacctggtccccgcctgcatcggttttcctgtcctggtggcgctggccaagggagaagtgacagagatgttcagttatgaggagtcaaatcctaaggatccagcggcagtgacagaatccaaag

SEQ ID NO: 11395 - DNA, 466 bp, Homo sapiens; identical to SEQ ID NO: 3055

SEQ ID NO: 11396 - DNA, 492 bp, Homo sapiens; identical to SEQ ID NO: 3056

SEQ ID NO: 11397 - DNA, 96 bp, Homo sapiens; identical to SEQ ID NO: 3057

SEQ ID NO: 11398 - DNA, 634 bp, Homo sapiens
  misc_feature 40, 41, 43, 634: n = A,T,C or G
ggcacgaggtcaccatgaagttcaatcccttcgttacctnngnccgcagtaaaaaccgcaaacgtcacttcaatgccccctcacacgtgcgcaggaagatcatgtcatccccgctctccaaggagctgcggcagaagtacaatgtccgctccatgcccatccgcaaggacgacgaggtccaggtagttcgaggacactacaaaggtcagcaaattggcaaggtagtccaggtgtacagaaagaaatatgtcatctacatcgagcgggtgcagcgtgagaaggccaacggcacaactgtccacgtgggcattcacccaagcaaggtggttatcaccaggctaaaactggacaaggatcggaaaaaaattcttgaacgcaaagccaagtctcgacaagttggaaaagagaaaggcaaatataaagaagaacttattgagaaaatgcaggaataaatagaacctgttgtgcaaccacggtttaaccggagattttgaggctagggtgtgtttctttcgaacttttcggaatgtctggaacatttcatttcctgttttgttacctgtgcctctgtaaatctacttttgcaattttaagtaataattttatgaataaaaatgggaaatgcttcctaaan

SEQ ID NO: 11399 - DNA, 572 bp, Homo sapiens; identical to SEQ ID NO: 3059

SEQ ID NO: 11400 - DNA, 697 bp, Homo sapiens
  misc_feature 27, 575, 657: n = A,T,C or G
ggcacgagggagaaccccctgcctgtncgtccccgggaaaaagaagaaccagtggttcgagagacaggtgaggtggtcgactgccacctcagtgacatgctgcagcagctgcacagtgtcaatgcctccaagccctcggagcgtgggctggtcaggcaagaggaggctgaggatcctgcctgcatccccatcttctgggtcagcaagtgggtggactattcggacaagtacggccttgggtatcagctctgtgataacagcgtgggggtgctcttcaatgactcaacacgcctcatcctctacaatgatggtgacagcctgcagtacatagagcgtgacggcactgagtcctacctcaccgtgagttcccatcccaactccttgatgaagaagatcaccctccttaaatatttccgcaattacatgagcgagcacttgctgaaggcaggtgccaacatcacgccgcgcgaaggtgatgagctcgcccggctgcctacctacggacctggttccgcacccgcagcgccatcatcctgcacctcagcaacggcagcgtgcagatcaacttctttcangatcacaccaagctcatcttgtgcccactgatggcagccgtgacctacatcgacgagaagccgggactttcgcacataccgnctgagtcttctggaggagtaccggttgctgcaaggagctg

SEQ ID NO: 11401 - DNA, 521 bp, Homo sapiens
ggcacgaggcgggacaggaggatccggtgcagcgggagattcaccaggactgggctaaccgggagtacattgagataatcaccagcagcatcaagaaaatcgcagactttctcaactcgttcgatatgtcttgtcgttcaagacttgcaacactaaacgagaaattgacagcccttgaacggagaatagagtacattgaagctcgggtgacaaaaggtgagacactcacctagaacagtgccgtgctgctgctgggaagttgctttacacaacacaggccacatgggaaaggccccagcagccttcagctccttcctttctccttaaagagcaacagggcttattcttgtttttcttttttcaaaagtgtggcctttgggctctgacatctggggtgtggtgtggtatgtgggaagaagttcaaaggaaccgttggaaacgacgttaggcattttaccttttcagtaacattttatacatctacttgtcaatgtatttgagacattcacagccaaaagcct

SEQ ID NO: 11402 - DNA, 492 bp, Homo sapiens
ggcacgagggcgtgttcggtggcggctctggccgctcaggcgcctgcggctgggtgagcgcacgcgaggcggcgaggcggcagcgtgtttctaggtcgtggcgtcgggcttccggagctttggcggcagctaggggaggatggcggagtcttcggataagctctatcgagtcgagtacgccaagagcgggcgcgcctcttgcaagaaatgcagcgagagcatccccaaggactcgctccggatggccatcatggtgcagtcgcccatgtttgatggaaaagtcccacactggtaccacttctcctgcttctggaaggtgggccactccatccggcaccctgacgttgaggtggatgggttctctgagcttcggtgggatgaccagcagaaagtcaagaagacagcggaagctggaggagtgacaggcaaaggccaggatggaattggtagcaaggcagagaagactctgggtgactttgcagcagagtatgc

SEQ ID NO: 11403 - DNA, 552 bp, Homo sapiens
ggcacgaggtcggtggggccggcggtcagtctgctgcagcggcagcaagacggtgcagtgaaggagagtgggcgtctggcggggtccgcagtttcagcagagccgctgcagccatggccccaatcaaggtgggagatgccatcccagcagtggaggtgtttgaaggggagccagggaacaaggtgaacctggcagagctgttcaagggcaagaagggtgtgctgtttggagttcctggggccttcacccctggatgttccaagacacacctgccagggtttgtggagcaggctgaggctctgaaggccaagggagtccaggtggtggcctgtctgagtgttaatgatgcctttgtgactggcgagtggggccgagcccacaaggcggaaggcaaggtgaggtgaggggcctgcaaggagtcaggaccaggtaggatattcttcttgtgacctttactttctctgcaggttcggctcctggctgatcccactggggcctttgggaaggagacagacttattactagatgattcgctggtgtccatctttggga

SEQ ID NO: 11404 - DNA, 134 bp, Homo sapiens
cccaccaatggaagcagctggcttcactgctcacgtgatgtatcctgaaccatacaggccaaatagagcgccggctatgcccctgtatcggattgccacacggctcacattgcatgcaagtttgctgagctgaa

SEQ ID NO: 11405 - DNA, 82 bp, Homo sapiens
caagctggggctcctaaaggttttatccacttggctgccaaggaaggcattggacaacagccagctttctcccaaaaagccc

SEQ ID NO: 11406 - DNA, 277 bp, Homo sapiens
actatagggctttttttttttcaaatgaatgacaactttatttttcttacacttttaaggctgatgaaaaaccttcatttcaattgaaaagtatgggaactgggtttactcattattattagttttctaaaacacaacttgaaaacatccagcatgcatgtttaatatcagtccaatgaattcaagaccaagtttacttgttacattcagcaaggctagattacagattatcatagtcatcatcatcatcatcggcatcatcatcatcttcacgttt

SEQ ID NO: 11407 - DNA, 64 bp, Homo sapiens
tatagggctttttttttttggctaagtggaaagaatttctttaccggggaaaggccctttggaa

SEQ ID NO: 11408 - DNA, 294 bp, Homo sapiens
agcggataacaatttcacacaggatgatgctaccagcaaatatgaatctgtcatgaaaacagagccaagcattgctgaatatacagttcgttcaaaggagaggatttgccactgcttttctaaggacgagaagcctgttgaagctattagggtttgttctgaagttttacagatggaacctgacaatgtgaatgccctgaaagatcgagcagaggcctatttgatagaggaaatgtatgatgaagctattcaggattatgaaactgctcaggaacacaatgaaaatgatcagca

SEQ ID NO: 11409 - DNA, 613 bp, Homo sapiens
caaaccctgttcttgggtgggtgtgggtataatactaagttgagatgatatcatttacgggggaaggcgctttgtgaagtaggccttatttctcttgtcctttcgtacagggaggaatttgaagtagatagaaaccgacctggattactccggtctgaactcagatcacgtaggactttaatcgttgaacaaacgaacctttaatagcggctgcaccatcgggatgtcctgatccaacatcgaggtcgtaaaccctattgttgatatggactctagaataggattgcgctgttatccctagggtaacttgttccgttggtcaagttattggatcaattgagtatagtagttcgctttgactggtgaagtcttagcatgcactgctcggaggttgggttctgctccgaggtcgccccaaccgaaatttttaatgcaggtttggtagtttaggacctgtgggttcgttaggtactgtttgcattaataaattaaagctccatagggtcttctcgtcttgctgtgttatgcccgcctcttcacgggcaggtcaatttcactggttaaaagtaagagacagctgaaccctcgtggggccattcatacaggtccctaa

SEQ ID NO: 11410 - DNA, 359 bp, Homo sapiens
gcttatggagggttcctctactattaggacttttcgcttcgaagcgaaggcttctcaaatcatgaaaattattaatattactgctgttagagaagtgaatgaccctacagatgataggatgtttcatgtggtgtatgcatcggggtagtccgagtaacgtcggggcattccggataggccgaaaaagtgttgtgggaaaaaagttagatttaccccgatgaatatgatagtgaaatggattttggcgtaggtttggtctagggtgtaccctgagaataggggaaatcagtgaatgaagcctcctatgatggcaaatacagctcctattgataggacatagtggaagtgagctacaacgt

SEQ ID NO: 11411 - DNA, 404 bp, Homo sapiens; identical to SEQ ID NO: 373

SEQ ID NO: 11412 - DNA, 494 bp, Homo sapiens; identical to SEQ ID NO: 3063

SEQ ID NO: 11413 - DNA, 341 bp, Homo sapiens; identical to SEQ ID NO: 3064

SEQ ID NO: 11414 - DNA, 460 bp, Homo sapiens; identical to SEQ ID NO: 376
  misc_feature 10, 13, 21, 23, 38, 41, 60, 67, 72, 75: n = A,T,C or G

SEQ ID NO: 11415 - DNA, 935 bp, Homo sapiens
  misc_feature 618, 627, 657, 670, 729, 782, 793, 808, 811, 837, 838, 839,840, 841, 842, 843, 844, 845, 846, 847, 848, 849, 857, 879,881, 892, 898, 904, 935: n = A,T,C or G
acgcggggtggggggggtcctggtctttggcttctcgactcggtcctgtttcgacagcgaacatgtcgcggcctgtcagaaataggaaggttgttgattactcacagtttcaggaatctgatgatgcagatgaagattatggaagagattcgggccctcccactaagaaaattcgatcatctccccgagaagctaaaaataagaggcgatctggaaagaattcacaggaagatagtgaggactcagaagacaaagatgtgaagaccaagaaggatgattctcactcagcagaggatagtgaagatgaaaaagaagatcataaaaatgtgcgccaacaacggcaggcggcatctaaagcagcttctaaacagagagagatgctcatggaagatgtgggcagtgaggaagaacaagaagaggaggatgaggcaccattccaggagaattccggcagcgatgaagatttcctaatggaagatgatgacgatagtgactatggcagttcgaaaaagaaaaacaaaaagatggttaagaagtccaaacctgaaagaaaagaaaagaaaatgcccaaacccagactaaaggctacagtgacgccaagtccagtgaaaggcaaanggaaaattnggtcgccccacagcttcaaaggcatcaaangggaaagaatccntctccaaaagaagaaagatgagggaaccggaaaaccccccagaaaaggaaaacatctanaagccccccaacccagaaatctggggataaaggggctgaaaaataaacccccntttggggaagntttaaaattatgaanggnctggggaaaaaatttttttaaaaaannnnnnnnnnnnnaaaaaaantttcctgcccgggggggcgccncnaaagggggaanttcaanaaaaangggggcggtttaaaaaggggtttccaccccn

SEQ ID NO: 11416 - DNA, 842 bp, Homo sapiens
  misc_feature 34, 40, 42, 44, 47, 48, 51, 54, 56, 58, 60, 67, 68, 69, 71,72, 75, 78, 82, 84, 91, 93, 95, 96, 99, 101, 102, 104, 105,106, 113, 119, 120, 123, 125, 126, 132, 136, 138, 172, 176,178, 180, 182, 186, 189, 190, 194, 195, 201, 204, 206: n = A,T,C or G
  misc_feature 207, 208, 210, 215, 223, 224, 231, 232, 242, 243, 245, 249,250, 251, 254, 256, 258, 259, 263, 265, 271, 276, 277, 279,283, 287, 290, 292, 293, 294, 300, 311, 312, 313, 316, 317,320, 332, 336, 337, 354, 365, 367, 368, 370, 373, 374: n = A,T,C or G
  misc_feature 376, 378, 388, 393, 401, 405, 407, 410, 418, 423, 429, 430,431, 432, 433, 437, 442, 448, 449, 459, 460, 467, 469, 474,475, 479, 483, 491, 493, 496, 500, 508, 511, 515, 517, 526,528, 529, 530, 533, 534, 535, 538, 539, 541, 542, 543: n = A,T,C or G
  misc_feature 546, 554, 555, 556, 558, 559, 568, 573, 574, 576, 579, 596,597, 600, 602, 605, 606, 607, 616, 625, 627, 630, 634, 639,644, 645, 650, 651, 652, 654, 657, 663, 664, 668, 670, 671,672, 680, 691, 707, 708, 711, 715, 717, 720, 722, 723: n = A,T,C or G
  misc_feature 726, 731, 740, 744, 745, 753, 755, 759, 760, 763, 767, 769,775, 777, 779, 781, 783, 788, 789, 799, 800, 803, 806, 813,815, 819, 826, 828, 833, 836, 841: n = A,T,C or G
tatgcctaaaaaagacacgggtcctatgcctcantcattncncnacnnggntcntntncntaaaaannncnnggntcntttncntaaaaangncnnggntnntnnncctaaancttccnnggncnnggttcntttncntaaaaaggacccggggcttttgctaacggtatcngctnantnanaggnggnnatanngttatncanannntnttggnataactcnngatagannatgttagcannangtcnnnatnangnntggnancgttantggcnncntagnttgncgntnnngcatangcttctcgccnnngannttntgctttcactgntttnngacgctctgctttagangttgtggcaantnncntanngntnttatttgacnttacnattgctgnctcncnatnttggatanctccnctctgnnnnncttnacttnttctcnngtcttgtctnnttagctngnttttnnttgntccngctttttntntcntttngagggaantanggcntntggtctttntnnnctnnnggnntnnnaancctttagnnntnnctatttaantttanntntgnttagggtctggtattcnngtntnctnnncggctttgntgtgcttgnangtntgcnactcntaatnnctggnnncngtntttcanntctncnnnatccgcgntttgctgtctntattaatcccctcgtnntancttntncantnnttntgttngcgtcatantacnngtttatangnttgnntcnatgntntatagntnantntntggtnncctagttctnngcnggngattctnanggtnttagctncntatangantgtgnt

SEQ ID NO: 11417 - DNA, 650 bp, Homo sapiens
tcccgccgcgccagttcgcctccgcaaagcccgtccctctcttccgcaggcaccatgttcctgactgcgctcctctggcgcggccgcattcccggccgtcagtggatcgggaagcaccggcggccgcggttcgtgtcgttgcgcgccaagcagaacatgatccgccgcctggagatcgaggcggagaaccattactggctgagcatgccctacatgacccgggagcaggagcgcggccacgccgcggtgcgcaggagggaggccttcgaggccataaaggcggccgccacttccaagttccccccgcatagattcattgcggaccagctcgaccatctcaatgtcaccaagaaatggtcctaatcctgagtcgtcacccttggattttatggatcacggagctgaccatctttacctggtcctggaactgaaaaactgtagcttgtgtgaaaatgagcctttggaccagtctttattaaaacaaacaaacatgagtagtctgcatatcgaatatctagagctctaaaccccccaatacttaaaagtctaattgctgtcctgtggtttcattagtctgataggaagatagggatttcctcagtcacagatgatattttgaaggaaagctgcaataaagccacaatgatttg

SEQ ID NO: 11418 - DNA, 555 bp, Homo sapiens; identical to SEQ ID NO: 3066

SEQ ID NO: 11419 - DNA, 548 bp, Homo sapiens
ttgtctgtcctcggaagaactccccctgcttctttctctaaaggctgtcttcaggccgggcacagtgggaggatcgcttgagcccagaaggccgcagtgaggtgagatcgcgccattgcactgcagcccccggcggcagagccggagccccgtctcgaaacaaacaaacaaaaaccaaccaaccaaccaaccaaccaacaaacaaacacagacaaagaaagaaagagcccaggcaacctagtgaaaacctgttcgggctggggcgtacctgtaccccagctgttccggaggctgaggccaggaggatgggtggacgctgggaggtggatgctgcagtgagcagtgattgcaccactgcactccagcctgggtgacagagccagaccccgtcccaaataaataaacataaaaataaaggaaccagtttgtagaaagcgggagagggtcccattgaacttcaagccttcgagcaacagctgtggctggacaggttggaccagcaggctggagcagtcgccatcttggcagggatcattgaccctgatcta

SEQ ID NO: 11420 - DNA, 565 bp, Homo sapiens; identical to SEQ ID NO: 3068

SEQ ID NO: 11421 - DNA, 70 bp, Homo sapiens
ccctgggacaccctgagcaccacccagaagaagagactgaaccacacgtaccagatgggctgctagtgca

SEQ ID NO: 11422 - DNA, 465 bp, Homo sapiens
ccctacagccgcgtggtgcacacctaccgcctccccagctgtggctgccaccccaagcactcctggggcgccctgtgccgcaagctgttccttggggagctcatctacccctggaggcagagaggggacaagcaggactgagggaactgctggctcgcctggcaccaccacacggccacagccagccatctgctctgccagggtggcaccagctcagctggcgcatgtcctgtgctttgtggacgctgctgtgtgctactgaacacggcaggccctgctatcacaccttgggcttggaggacattgggagtgagcagatgtgggggtggccagccaagctggccgcactccatcactggcactgactgccttgagacccgcttcccacctgctgcggtcaccatggtggcgagcacagcaaccccaggtgtccagagcactgccccatgcccaccctgtgtaccc

SEQ ID NO: 11423 - DNA, 713 bp, Homo sapiens
  misc_feature 510, 547, 655, 668, 710, 712: n = A,T,C or G
cacttccctcgttattttctctcattttttgatgagaggaaaatttgaaacattattcttgttgttgttggtaatagcataatgacagtgggaggggtacaaggggataagaaaaatgtcatgatttttttccggtcctgccacatgtaacacttactctgttacctaaattttatagttagatcatatccaatctacttattaaactgtgttctatttaccagtggagtttttctgcagtggttgcgtttcactgtaaggataatggagttcctctcctctgctttcctcagaggatggtcctttaacatagccagaaacaagccctgtggtttgaaggtgagctgtgaggatgggactaattgatatgcaccagtttacaaagacagtcttatcatccgagaatacaccatctttttctctggataattatttcttacatcatgcttgattcctacattttgttgggtctcaacattggctcacgaatgctggtaatatttattctgnattgataaaaagtctgtcttgccactacaagtaaatnccccatttaatattttcttctttagcatagcactgtcattttttgtgaaaatggttatgtttatttattacaatactgagtcatatataaaattttcaaataaaagcngaaactttcttanccttaaaaaaaaaaaaaaaaaaaaactcgagcctttagactntng

SEQ ID NO: 11424 - DNA, 464 bp, Homo sapiens
gctgtcgatgacggcctccgtgctgcgaagtatctcgctagccctgcgcccgactagcgggcttctgggaacttggcagacgcagcttagagagactcaccagcgagcgtcattgttgtctttctgggaactcattcccatgagatcagaacctcttcgaaaaaagaagaaggtagatcctaaagaagaccaagaagcaaaggagcgcttgaaaaggaagatccgaaaactggaaaaggctactcaagagctaattcctattgaagattttattacccctctaaagttcttggataaagcacgagagcggcctcaggtggagctcacctttgaggagactgacaggagagctctgcttctgaagaagtggtccttgtacaagcagcaagagcgtaagatggagagggacaccatcaaggctatgctagaagcccatcaggaagctctggaggaactgcaactgg

SEQ ID NO: 11425 - DNA, 539 bp, Homo sapiens
tccgttgctgtcggttttttctgctttctttgaaatgttccttacagaataactacatgaatgtaatcacatgcatttaaaatagtctagagaatatagtgtgaaactataatggtatttttttagatgaggtttctggtggcatattactaaaattttaaactccttgatcttatgctgttaaccaagaagatggggatttgtgttactttagacactgctgggtgccatggtaaattgggatgttattgtaaattgtagctctcacagctgcgtattgcttacaaactcggaaggatagtctcatatcagtaaacatttttatgaacgtagttgaacttttttgtaaattaatgtgctggaaagaataccaagagggccctaaaaaagtctaaaaggattaaaatttacttatgtaattattggtattttaaaatatttggtagtcacttaaaatgcataatgacagacaatagggtgtcataatatggtttattaatcttttttcattttccactagatgtggcaactacatagtt

SEQ ID NO: 11426 - DNA, 259 bp, Homo sapiens
gtcgctccgctcagtttccggtgcggcgaacaccaaagtccgggaacttaagcattttcggtttctagggttgttacgaagctgcaggagcgagatggaggtggacgcaccgggtgttgatggtcgagatggtctccgggagcggcgaggctttagcgagggagggaggcagaacttcgatgtgaggcctcagtctggggcaaatgggcttcccaaacactcctactggttggacctctggcttttcatccttttcgat

SEQ ID NO: 11427 - DNA, 605 bp, Homo sapiens
ttccgttgctgtcggcgggtttcggttggaggactcgttggggaggtggcctgcgcttgtagagactgcatccccgagacgatggcggagggagataatcgcagcaccaacctgctggctgcagagactgcaagtctggaagaacagctgcaaggatggggagaagtgatgctgatggctgataaagtcctccgatgggaaagagcctggtttccacctgccatcatgggtgtggtttctttggtgtttctgattatctactatctagatccatctgttctgtccggcgtttcctgttttgttatgtttttgtgcttggctgactaccttgttcccattctagcgcctagaatttttggctccaataaatggaccactgaacaacagcaaagattccatgaaatttgcagcaatctagtaaaaactcgacgcagagctgtgggttggtggaaacgcctcttcacactaaaggaagaaaaacctaagatgtacttcatgaccatgatcgtttcccttgctgcggttgcttgggtgggacaacaagtccacaacctgcttctcacctacctgatagtgacttccttactattgcttcctggactaaa

SEQ ID NO: 11428 - DNA, 572 bp, Homo sapiens
gtcgggtacttctcctagttgcagtcaggcttcatacgctattgtcctgcccgtaagttcccgttttgtgtgtggtgagtggaaactccatgttcttcgttggagacctctggtcctcccttcccttctttgtgccgtcgtctctgcggccagccctaatctccttctcgtggcttctccgtctctgaccccaaataggccttaagggcgtgggagaaatgagtttctggagctggaaaagccactgccttctgcacgggcctgagaagcccttggctggtgtaaatgatgacttcacttttttccccatcagatcgacaatgctgacgtcttatattttgccagttagttctgatacatcggcctcaaaaggcccggccttgttcgtttctgaccgtgggaagatggcggttaacgccctttatttgttggttcacaggttagagcagccagcgggtacagaatggattttggaagagggagtcaccactggacctccaaggaagccacgtgcagacatctacaaccttcgatctcctgacgagtaagtctttgtctcctatgggtctact

SEQ ID NO: 11429 - DNA, 473 bp, Homo sapiens
aagggcagctgactaagagccctctggcacaaatggaagaagaaagaagggagcatgtagctaaaatgaaaaagatggagatggagatggagcaggtgtttgagatgaaggtcaaagaaaaagttcaaaaactgaaggactctgaagctgagctccagcggcgccatgagcaaatgaaaaagaatttggaagcacagcacaaagaattggaggaaaaacgtcgtcagttcgaggatgagaaagcaaactgggaagctcaacaacgtattttagaacaacagaactcttcaagaaccttggaaaagaacaagaagaaagggaagatcttttaaactctctattgaccaccagttaacgtattagttgccaatatgccagcttggacatcagtgtttgttggatccgtttgaccaatttgcaccagttttatccataatgatggatttaacagcatgacaaaaattatttttttt

SEQ ID NO: 11430 - DNA, 456 bp, Homo sapiens; identical to SEQ ID NO: 2710

SEQ ID NO: 11431 - DNA, 552 bp, Homo sapiens
ggcacgaggaaaaagaagactcatttggaaatgaagctgtccctttccaagcagtctctggtgcttttcttctctcaaaatggatccgataaatatttgaatagagcagattgtagaatgtcgtgctgtcaccagaaagctgctgttttgggttctgcattgagccaaatatgtagaggacctaccaagcccactgagggactaggttttcatgtctctggtcatacctagaatgttctgagccgtctgagggccttcatgccggcagcagctagcaaagccagaaagcaagtctaacaggatctaagatgaccatcaggagaaggagtttgagactgtgtatgcaacccccaatagacccccttttactctgatctggagaatgtatctggcttcatattttcaagtcacatgtctctcagacccctggattcagaacccaaggccacaaatcataggcatgaagcactttcttaagactgacctaacgctggattatttcccgtccaatgcctgcatgctgcttgaattgctccacccacacctccatga

SEQ ID NO: 11432 - DNA, 622 bp, Homo sapiens; identical to SEQ ID NO: 3075
  misc_feature 255, 602, 615: n = A,T,C or G

SEQ ID NO: 11433 - DNA, 542 bp, Homo sapiens
cgacaaatgcacctcacagtgttaaattcttgctcaaaatcaaacatccccaagggacaagtggaagattcaaactccttatgggctggagttcaagaccagcctggtcaacatggtgaaactcccctctactaaaaatacataaattagctgggcgtggtggcatgcacctgtaatcccagctacttgggaggccgaggcaggcagatcacctgaggtcaggagttcgagaccagcctggccaacatggttgaaaccccgtctctactaaaaatacaaaaattagccgggtgtggtggtgggcgcctataatcccagctattcgggaggctgaggcaggagattgcttgaacccaggagagggagtttgcagtgagccgagatcgtgccactgcactccagcctgggggacagagcacagtggttcatgcctgtaatcccagcactttgggaggcagaggagggcggatcacctgaggtcgggagctcgagaccagcctgaccaacatggagaaaccccatctctactaaaaatacaaaat

SEQ ID NO: 11434 - DNA, 376 bp, Homo sapiens
tagtaggacgtagggtcttattttgttttcaaacccacatcctcagagcgcagatacatgcagaggcttctgccaggataccacggggccttagtgggaacaggtggagaccatcacttacctttcctgctgctgaggtagggattgcggggtcagaacccactcacttttgcctgttaaagttgccctcctgacgctggcagctctgccttggtcactggggatgcggctcgttgctcagccaccagtggccttgcggtattgtccaccatccactagagtgggatgaagtccacagtgtgggtatacatctcagatgcccatctacccactggggacttcaatgccagctgcatttggtttggttttcttaact

SEQ ID NO: 11435 - DNA, 624 bp, Homo sapiens
acgctagagcatgaggggggctacctccccttcgaggccgacatcagcaacctggtccaggtggggcccctgccctcccggcttcgaatcactatcgccatcaacaacacactcacccccaccaccctgccaccagggaccatccaatacctgactgacacctccaagtatcccaagggttactttgtccagaacacatattttgactttttcaactacgctggactgcagcggtctgtacttctgtacacgacacccaccacctacatcgatgacatcaccgtcaccaccagcgtggagcaagacagtgggctggtgaattaccagatctctgtcaagggcagtaacctgttcaagttggaagtgcgtcttttggatgcagaaaacaaagtcgtggcgaatgggactgggacccagggccaacttaaggtgccaggtgtcagcctctggtggccgtacctgatgcacgaacgccctgcctatctgtattcattggaggtgcagctgactgcacagacgtcactggggcctgtgtctgacttctacacactccctgtggggatccgcactgtggctgtcaccaagagccagttcctcatcaatgggaaacctttctatttccac

SEQ ID NO: 11436 - DNA, 521 bp, Homo sapiens; identical to SEQ ID NO: 3077

SEQ ID NO: 11437 - DNA, 411 bp, Homo sapiens
  misc_feature 340, 350: n = A,T,C or G
cgttgctgtcgattattttagctaaattcagggagattgcgtggggcaggaaagcatgcattgaaaaatttctaaccacggttatttaagcataatctgaaaacatctagcccaaaggtaagttgctattttcatcacagttgcctatgcccagggaataagatgtattctttataattgaattggtttttcccacgtctaactggaaacaaaacagaaggggcgtcataaatttgaataagcagaacatactgttctcaacatactgtaatcaaaaggaggaatttcagtgggtctctgtgtgtgtatgagagagagagtgtgtgtttgtgtgtttcanggtcaaaacnggtttttttgtttttggtgctgggcgggtgggcctgcttccggctgggggggggcttgccg

SEQ ID NO: 11438 - DNA, 551 bp, Homo sapiens
atttgaccaaatggaagaatcatgttagttctgacctcaatactatagtaacttttaggcgtgggtgtagaagtttataggtttctattgacagttattgtaaattagcatttactgtggtacaaattctttataactgacttagtcatttgccgcttagcagtttatatactgaaatgaaaacatcttgtggggaaaagtgactttagattatgaactcaattcaaatgaactctatttaaaatggggtcctattttggacaaaggaaattaagaatgtaaaagtcagaacagtcttgaggtaaaaagtgtgctttggcttaaaagggatacagtatattaattacatcttttattattattgtttatttcttagaatcatttctggctttctcaaaacaaaataatattaatgagtacttctatttgctgcatttttcttattacagcctttgaaacagctggtaattataagtcattttccattttttaaaacataattttataaagaattctcttatctcgactatgtagaataccacctactggac

SEQ ID NO: 11439 - DNA, 513 bp, Homo sapiens; identical to SEQ ID NO: 3078

SEQ ID NO: 11440 - DNA, 482 bp, Homo sapiens
tcattttggagggaagcggcttagccttctctataagggtagtgtccatggattccgtaatggagttttgcttgacagatgttgtaatcaagggcctactctaacagtgatttatagtgaagatcatattattggagcatatgcagaagagagttaccaggaaggaaagtatgcttccatcatcctttttgcacttcaagatactaaaatttcagaatggaaactaggactatgtacaccagaaacactgttttgttgtgatgttacaaaatataactccccaactaatttccagatagatggaagaaatagaaaagtgattatggacttaaagacaatggaaaatcttggacttgctcaaaattgtactatctctattcaggattatgaagtttttcgatgcgaagattcactggatgaaagaaagataaaaggggtcattgagctcaggaagagcttactgtctgccttgagaacttatg

SEQ ID NO: 11441 - DNA, 404 bp, Homo sapiens
cgttgctgtcggtatattatgagaaagtggggtttcgtggagttgaagaaaagaaatcattagaaattctcctaaaagatgaccgtctggatactgagaaactttgtacttttagtcagaggttccctctcccgtccatgtaccgtgcattggtatggaaggtgcttctaggaatcttgcctccacaccacgagtcccatgccaaggtgatgatgtatcgtaaggagcagtacttggatgtccttcatgccctgaaagtcgttcgctttgttagtgatgccacacctcaggctgaagtctatctccgcatgtatcagctggagtctgggaagttacctcgaagtccctcttttccactggagccagatgatgaagtgtttcttgccatagctaaagccatggag

SEQ ID NO: 11442 - DNA, 541 bp, Homo sapiens
ttccgttgctgtcggtacactctgtgattgtacaattttaaaatctcctaatgatgatgcatttctcagaatgtatcccctttgctaagcaatgcatgactgcaatcctaattctcacatgttttggggaaaaaattttaattttgaaaaaatttaggaaagttcctaccaaatatacatgtataaagtttattaaaagtcataatgacccaggaatagctaatgacacagaagtagatcaaaatagaacacaatagagaacttcaaaataaaacaggtgtgagaattgtgtgtgtgaaaaagctgggttcaaataagttggtttgttagacattcatatgcctactcatcagccatttcgttctcccttccttgctgacaaagccccattttttttttctttttttttggcctaaaactctgtatggctgccttgtgctataaaatagggtgcttccctagcctaaagagggtgagtgttgattagattctgtgccaatcatggtaattggcttacttgatcatttgatggaatctaggc

SEQ ID NO: 11443 - DNA, 506 bp, Homo sapiens
ccagctgggcccctcccaggcactgccaggaagccccagctgcccctggcgggtgtggtggaaatggcaggagggtgcaggtactcttggggccccagcggtgggagtgcaaaagacccaacgccaacacctggtgccttctgcagccagcgcccacccatccgtgcccggacccttgggaatgcccgcggctccagaggaaaaagcccagggacggggcctccgttgcggggggtcggctgcttcttgggaactttgtcgtttccggcgctggctggctggctggctgtaaagcactgaagccccccggccgccaacccctgaaagcagaacctggcctccctggccacagcagccttacccaccgctctacgtgtcccgggcacttcccgcagccttcccgtccctttctcatcggccttgtagttgtacagtgctgttggtttgaaaaggtgatgtgtggggagtgcggctcatcactgagtagagaggtagaatttctattt

SEQ ID NO: 11444 - DNA, 399 bp, Homo sapiens
ggcacgagattgcttttcatagtgcagtaagtttggacccaattaaatcctttgaagctcctgcaaccatcaattctgcatctcttcatcctgagaaagaatttcttgttgcaggcggtgaagattttaaactttataagtatgattataatagtggagaagaattagaatcctacaagggacactttggtcctattcactgtgtgagatttagtcctgatggagaactctatgccagtggttcagaagatggaacattgagactatggcaaactgtggtaggaaaaacgtatggcctttggaaatgtgtgcttcctgaagaagatagtggtgagctggcaaagccatttttgaattgctgattactttggctttaatcagtggtcacctagaaaaagc

SEQ ID NO: 11445 - DNA, 89 bp, Homo sapiens
agcggttgacgaggtgcagcgcgagagggtgtcagccaagaacgccctggagtcctacgccttcaacatgaagagcgccgtggaggatg

SEQ ID NO: 11446 - DNA, 300 bp, Homo sapiens
ctcacacctacccctaccgtccagcctggcctcttccctgaatcagcttcaagatggcaccagctctttgggcctaggatactgccgggccccccaagggggtccccagcaaccaggcctggcctcctggtgtctgcggtcacagtggcccctgggcaggggcacccaggctgaccctgaggtgctgctgctgggtctgtcttggctctggggtgtgctgggagggtcaccaggtcccttttccttcctgtgccctctgaaagctaagtgtctgtgtggctgtggagctcgagggtctgt

SEQ ID NO: 11447 - DNA, 502 bp, Homo sapiens
cgcgagatcctctccattttgggcttgccccaccgcccgcgcccgcacctccagggcaagcacaactcggcacccatgttcatgctggacctgtacaacgccatggcggtggaggagggcggcgggcccggcggccagggcttctcctacccctacaaggccgtcttcagtacccagggcccccctctggccagcctgcaagatagccatttcctcaccgacgccgacatggtcatgagcttcgtcaacctcgtggaacatgacaaggaattcttccacccacgctaccaccatcgagagttccggtttgatctttccaagatcccagaaggggaagctgtcacggcagccgaattccggatctacaaggactacatccgggaacgcttcgacaatgagacgttccggatcagcgtttatcaggtgctccaggagcacttgggcagggaatcggatctcttcctgctcgacagccgtaccctctgtgcctcggaggagggct

SEQ ID NO: 11448 - DNA, 140 bp, Homo sapiens
ggcacgagggaaagcagagagcttgaagaaatgtctctctgtcatggaagccaaagtgaaggctcagactgctccaaacaaggatgtgcagagggagatcgctgaccttggagaggccctggccactgcagtcatccccc

SEQ ID NO: 11449 - DNA, 577 bp, Homo sapiens
agatgtgtatgagttcagagacaagctgtgtggaccatatgaaaaatttatatgtgagcaggattatcaaaattttttgagactcctcacagaaactgaagactggctgtatgaagaaggagaggaccaagctaaacaagcatatgttgacaagttggaagaattaatgaaaattggcactccagttaaagttcggtttcaggaagctgaagaacggccaaaaatgtttgaagaactaggacagaggctgcagcattatgccaagatagcagctgacttcagaaataaggatgagaaatacaaccatattgatgagtctgaaatgaaaaaagtggagaagtctgttaatgaagtgatggaatggatgaataatgtcatgaatgctcaggctaaaaagagtcttgatcaggatccagttgtacgtgctcaggaaattaaaacaaaaatcaaggaattgaacaacacatgtgaacccgttgtaacacaaccgaaaccaaaaattgaatcacccaaactggaaagaactccaaatggcccaaatattgataaaaaggaagaagatttagaagacaaaaac

SEQ ID NO: 11450 - DNA, 297 bp, Homo sapiens
cgggttctgacaagatggccgggctgccccgcaggatcatcaaggaaacccagcgtttgctggcagaaccagttcctggcatcaaagccgaaccagatgagagcaacgcccgttattttcatgtggtcattgctggccctcaggattccccctttgagggagggacttttaaacttgaactattccttccacaagaatacccaatggcagcccctaaagtacgtttcatgaccaaaatttatcatcctcatgtagacaagttgggaagaatatgtttagatattttgaaagataaga

SEQ ID NO: 11451 - DNA, 549 bp, Homo sapiens; identical to SEQ ID NO: 3086

SEQ ID NO: 11452 - DNA, 89 bp, Homo sapiens
ttttccttttccaaattttttttcccctcctaaaaaactccaaaagggcccttaaaagccttttttttaaaaaagggattttttttttt

SEQ ID NO: 11453 - DNA, 559 bp, Homo sapiens
ggcacgagcctcccgccttttgttgctaccccgagtcttgctgaccatggcctctggaagccctccgacccagccctcgccggcctcggattccggctctggctacgttccgggctcggtctctgcagcctttgttacttgccccaacgagaaggtcgccaaggagatcgccagggccgtggtggagaagcgcctagcagcctgcgtcaacctcatccctcagattacatccatctatgagtggaaagggaagatcgaggaagacagtgaggtgctgatgatgattaaaacccaaagttccttggtcccagctttgacagattttgttcgttctgtgcacccttacgaagtggccgaggtaattgcattgcctgtggaacaggggaactttccgtacctgcagtgggtgcgccaggtcacagagtcagtttctgactctatcacagtcctgccatgatgagccctgttcctgctcatcatgaagatccccgcgatacttcaacgccttctgacttccaggtgatgactgggcccccaataaatcccgtctttgggtctc

SEQ ID NO: 11454 - DNA, 326 bp, Homo sapiens
ggcttagcggataacaatttcacacaggatggattggtcagagtgaattgaatattgtaagtcagccactgggacccgaggatttctgggaccccgcagttgggaggaggaagtagtccagccttccaggtggcgtgagaggcaatgactcgttacctgccgcccatcaccttggaggccttccctggccttgagtagaaaagtcggggatcggggcaagagaggctgagtacggatgggaaactattgtgcacaagtctttccagaggagtttcttaatgagatatttgtatttatttccagaccaataaatttgtaactttgcg

SEQ ID NO: 11455 - DNA, 453 bp, Homo sapiens
ccgttgctgtcggccggcggaagacctggctccgtcatggcctctgccctgaggccaccccgtgtccccaagcctaagggtgtcctgccttcacactactatgagagctttctagagaagaaggggccctgtgaccgggattacaagaagttctgggcaggcctgcagggtctcaccatttatttctacaatagcaatcgggacttccagcacgtggagaagctcaacttgggagcatttgagaaactcacagatgagattccctggggaagctcacgtgaccctggcacccacttcagcctgattctccggaatcaggagatcaagttcaaggtagagaccttggagtgtcgggaaatgtggaaaggcttcatcttaacggtggtggagctccgtgtcccgaccgacttgaccctgctttctgggcacctatacatgatgtctgaagtcttg

SEQ ID NO: 11456 - DNA, 103 bp, Homo sapiens
ttccgttgctgtcggctcaaaataccaatgcagtttctgcattctgggttttgtttttccttttttttttttaaattttgcctttggcccccaaggtggaagg

SEQ ID NO: 11457 - DNA, 496 bp, Homo sapiens
gtggaaaaggtggagcgattagaatgggtatattcagttctcgaggagaaaagatccttatggcagatgctgatggagccacaaagtttccagatgttgagaaattagaaaaggggctaaatgatctacagccttggcctaatcaaatggctatagcatgtggatctcgagctcatttagaaaaagaatcaattgctcagcgttcttacttccgtactcttctcatgtatgggttccactttctggtgtggttcctttgtgtcaaaggaatcagggacacacagtgtgggttcaaattatttactcgagaagcagcttcacggacgttttcatctctacacgttgaacgatgggatttgatgtagaactactgtacatagcacagttctttaaaattccaatagcagaaattgctgtcaactggacagaaattgaaggttctaaattagttccattctggagctggctacaaatgggtaaagacctactttttata

SEQ ID NO: 11458 - DNA, 565 bp, Homo sapiens
cgttgctgtcggggcctggctcctggcccagatggcacctggcctcttgagtctgctgggggaccccaaagttggtggtcccatagcctgccctcctgggtctccacctcatgcctggacaggacgctgtggcctgtccgggccttggccagccctgcagctgcacccccgatcctcatccctcaccccattccctgccagcatcctaaggctcctggcgggcatcctctctgctcaaaattattgacctgtctcccggccacacctgctgtgccctctcagccaggccatcatcaccccctgttcattatgtcaggcctcatgggagcctggccttctccagaagctggccccggcgtcctcccaagctggaccacgtaggccccagatcacacctgggggtccagatgtaggggtcccgtgtgcacgcccaatcagaccgagcacttgtgacactaccccaacacctctcccagggctgaatgaggaacgcgccactggacacatgaggaagaggctgccctgggagctactgatgctgtgacctcacctctctggctttggg

SEQ ID NO: 11459 - DNA, 452 bp, Homo sapiens
ccgttgctgtcgcatggctcctgtgaaaagcttgtggtgaaggggggcaaaaaaaagaagcaagttctgaagttcactcttgattgcacccaccctgtagaagatggaatcatggatgctgccaattttgagcagtttttgcaagaaaggatcaaagtgaacggaaaagctgggaaccttggtggaggggtggtgaccatcgaaaggagcaagagcaagatcaccgtgacatccgaggtgcctttctccaaaaggtatttgaaatatctcaccaaaaaatatttgaagaagaataatctacgtgactggttgcgcgtagttgctaacagcaaagagagttacgaattacgttacttccagattaaccaggacgaagaagaggaggaagacgaggattaaatttcatttatctggaaaattttgtatgagttcttgaataaaacttgggaacc

SEQ ID NO: 11460 - DNA, 392 bp, Homo sapiens
  misc_feature 2, 3, 4, 5, 6, 7, 8, 9, 10, 13, 21: n = A,T,C or G
gnnnnnnnnnccnttggaagncccttcctctgaagggccgatgtatataactatctattcgatgatgaagataccccaccaaacccaaaaaaagagatctctcgaggatccgaattccagatctatgaatcgtagatactgaaaaaccccgcaagttcacttcaactgtgcatcgtgcaccatctcaatttctttcatttatacatcgttttgccttcttttatgtaactatactcctctaagtttcaatcttggccatgtaacctctgatctatagaattttttaaatgactagaattaatgcccatcttttttttggacctaaattcttcatgaaaatatattacgagggcttattcagaagctttggacttcttcgccagaggtttggg

SEQ ID NO: 11461 - DNA, 356 bp, Homo sapiens; identical to SEQ ID NO: 3087

SEQ ID NO: 11462 - DNA, 169 bp, Homo sapiens
ttcttttttttctacaacttgaattttttttaacattaaaaaattctggccaggcatggtagctcatgccctataatcctagcattttgggaggccaaggtgggaggatcacttgaggctaggagtttgagaccagcctaggcaacacagtgagaccctgtctctatgg

SEQ ID NO: 11463 - DNA, 568 bp, Homo sapiens; identical to SEQ ID NO: 3088

SEQ ID NO: 11464 - DNA, 494 bp, Homo sapiens; identical to SEQ ID NO: 3089

SEQ ID NO: 11465 - DNA, 463 bp, Homo sapiens; identical to SEQ ID NO: 344

SEQ ID NO: 11466 - DNA, 677 bp, Homo sapiens
gctgtcggtcagccatggccaccgctctcgcgctacgtagcttgtaccgagcgcgaccctcgctgcgctgtccgcccgttgagcttccctgggccccgcggcgagggcatcggctctcgccggcggatgacgagctgtatcagcggacgcgcatctctctgctgcaacgcgaggccgctcaggcaatgtacatcgacagctacaacagccgcggcttcatgataaacggaaaccgcgtgctcggcccctgcgctctgctcccgcactcggtggtgcagtggaacgtgggatcccaccaggacatcaccgaagacagcttttccctcttctggttgctggagccccggatagagatcgtggtggtggggactggagaccggaccgagaggctgcagtcccaggtgcttcaagccatgaggcagcggggcattgctgtggaagtgcaggacacgcccaatgcctgtgccaccttcaacttcctgtgtcatgaaggccgagtaactggagctgctctcatccctccaccaggagggacttcacttacatctttgggccaagctgctcaatgaaccgccaggaactgacctgctgactgcactctgccaggcttcccaatgctttcactcttatctaccctttggcacttatcttgcttatcaacataataatttatacac

SEQ ID NO: 11467 - DNA, 476 bp, Homo sapiens
aaacttcctcctggaggaatacctggcattgacctctcagatcccaaacaactggcagaatttgctagaatgaagccaagaaaaattaaagaagatgatgctccaagaacaatagcttgccctcataaaggctgcacaaagatgttcagggataactcggccatgagaaaacatctgcacacccacggtcccagagtccacgtctgtgcagaatgtggcaaagcttttgttgagagttcaaaactaaaacgacaccaactggttcatactggagagaagccctttcagtgcacgttcgaaggctgtgggaaacgcttttcactggacttcaatttgcgcacacatgtgcgaatccataccggagacaggccctatgtgtgccccttcgatggttgtaataagaagtttgctcagtcaactaacctgaaatctcacatcttaacacatgctaaggccaaaaacaaccagtgaaaaga

SEQ ID NO: 11468 - DNA, 548 bp, Homo sapiens
gacaagcttcgtttcaggggtctgccgttccatcctggttcagagaaggccgagcgtggctttctctagccttgtcactgtctccctgcctgtcaatcaccacctttcctccagaggaggaaaattatctcccctgcaaagcccggttctacacagatttcacaaattgtgctaagaaccgtccgtgttctcagaaagcccagtgtttttgcaaagaatgaaaagggaccccatatgtagcaaaaatcacggctgggggagagccgggttcattccctgtcctcattggtcgtccctatgaattgtacgtttcagagaaattttttttcctatgtgcaacacgaagcttccagaaccataaaatatcccgtcgataaggaaagaaaatgtcgttgttgttgtttttctggaaactgcttgaaatcttgctgtactatagagctcagaaggacacagcccgtcctcccctgcctgcctgattccatggctgttgtgctgattccaatgctttcacgttggttcctggcgtgggaactgctctcctttgc

SEQ ID NO: 11469 - DNA, 461 bp, Homo sapiens
gaagttgatttcaagccattcggaaccttacttcatacctactcagttctcagtccaacaggaggagaaaactttacctttcagatatataaggctgacatgacatgtagaggctttcgagaatatcatgaaaggcttcagacctttttgatgtggtttattgaaactgctagctttattgacgtggatgatgaaagatggcactactttctagtatttgagaagtataataaggatggagctacgctctttgcgaccgtaggctacatgacagtctataattactatgtgtacccagacaaaacccggccacgtgtaagtcagatgctgattttgactccatttcaaggtcaaggccatggtgctcaacttcttgaaacagttcatagatactacactgaatttcctacagttcttgatattacagcggaagatccatccaaaagctatgtgaaattacg

SEQ ID NO: 11470 - DNA, 363 bp, Homo sapiens
tttgcctaccgggttaaagcagttttcctgcctaagcctttcaagtagttgggattacaggcacttgtaaccaccccgggttaatttttgttttttaagttaaaacggggtttaaccatgtggggcaggctagtttcaaactcctgacctaaagtgatccgcctgccttggcctcccacagggttggaattacaggtgtgagccaccgggcctggcctacttttgaaatttgggatgaggaaacaaaaaataaattgtttaaaaccacttaaaaaaattcatggaaaatacttatttaaaaaaaagtagttaatataaccttattttttttatctgctaacccctttttttaaaatgcactta

SEQ ID NO: 11471 - DNA, 150 bp, Homo sapiens
tgcaaaccatcgtccatattgcaagcaatcagatttatttatttattttttgaggcaggagaatggcgtgaacccgggaggcaaagcttgcagtgagccaagatcgcaccactgcactccagcctgggtgacagagcgagactctgtctc

SEQ ID NO: 11472 - DNA, 414 bp, Homo sapiens
ggagcatggctgggagccgtgaggtggtggccatggactgcgagatggtggggctggggccccaccgggagagtggcctggctcgttgcagcctcgtgaacgtccacggtgctgtgctgtacgacaagttcatccggcctgagggagagatcaccgattacagaacccgggtcagcggggtcacccctcagcacatggtgggggccacaccatttgccgtggccaggctagagatcctgcagctcctgaaaggcaagctggtggtgggtcatgacctgaagcacgacttccaggcactgaaagaggacatgagcggctacacaatctacgacacgtccactgacaggctgttgtggcgtgaggccaagctggaccactgcaggcgtgtctccctgcgggtgctgagtgagcgcc

SEQ ID NO: 11473 - DNA, 55 bp, Homo sapiens
ggcacgaggatatgtcctgactcacacagcgaacctacagcagctccctcaaacg

SEQ ID NO: 11474 - DNA, 99 bp, Homo sapiens; identical to SEQ ID NO: 391

SEQ ID NO: 11475 - DNA, 280 bp, Homo sapiens
  misc_feature 219, 225, 229, 237, 240, 247, 248, 250, 251, 252, 254, 259,262, 273: n = A,T,C or G
aattccgttgctgtcgctttgaaatgtaacaaatggtactacaaccaattccaagttttaatttttaacaccatggcaccttttgcacataacatgctttagattatatattccgcactcaaggagtaaccaggtcgtccaagcaaaaacaaatgggaaaatgtcttaaaaaatcctgggtggacttttgaaaagcttttttttttttgaaacggagtnttgctntgtngcccaggntgnagggcannannncnatctnggntaattgcaccntccgttt

SEQ ID NO: 11476 - DNA, 540 bp, Homo sapiens
tcgctttcacagtcagaagtgggtctgtgggatctgtggtccctgtcctccctgctgtcccttctggggaggctttggtggctctgaggtggacaaagagctctcgcaagaagagacagcgtgatgcctcccacagtccaccccagaccctggggcagcccctctggccctgccagctgcctgcgtcgttgggcccagggtggctggcaggagtcccagctgcttgctttaggacctggcagcttttcttgccgtccctcccctgcctccagaatcacagcccttctccccaagggaggctgaggaggcttctccaccagtggcagccccaccccgtccctggccattcttggcctccaccccgctcaggcccctactcgggcgctcccagaaggagccacctctcagtgcctcacctccccctgcctcccagcctccgcagatgaggttcctgccccttcctcctcgtaaccaaaaccctcactgctcccaggacggtcttatttataaaccagatacatgttcttagtctggtcccag

SEQ ID NO: 11477 - DNA, 548 bp, Homo sapiens
gctgtcgaaaaggggagcctttctacatttgctccttctgggccagccgcaaaccattttgcagccctcactggccttgagatgcactttcttctcaacctaaagtggcatcttgacccttggcccttggcctcggcagtgacactgatgacaattcagaccaggctcaccggtgccgtcacttaggaatgctggaacaaaggacatttctcaaagttcccctgaagacatgccatctctagaaccttttttctccccgactctacccccacctctgttcctagagccctctgctggcgagtccagaaacattattgcccagaaggattatgtgtttatggattattttgccccgcctcaggagcgcaggaagtcactaccatttatattctaaaacagacctatctatgttcataggacttctgatgtgttcagataggaatcctcatgagagatcattatgctttgtgccctggaccactgctgctctgggttctcaggaggaacaggcaagagcagcttcattctaagcctttccagtgacctca

SEQ ID NO: 11478 - DNA, 353 bp, Homo sapiens
cggggtaccagaatctggcgagatccggactctaaagccgtgtctgctgcgccgcaactacagccgcgaacagcacggcgtggccgcctcctgcctcgaagacctgaggagcaaggcctgtgacattctggccattgataagtccctgacaccagtcaccctggtcctggcagaggatggcaccatagtggatgatgacgattactttctgtgtctaccttccaatactaagtttgtggcattggctagtaatgagaaatgggcatacaacaattcagatggaggtacagcttggatttcccaagagtcctttgatgtagatgaaacagacagcggggcagggttgaagtgga

SEQ ID NO: 11479 - DNA, 548 bp, Homo sapiens
  misc_feature 374: n = A,T,C or G
cgttgctgtcggtaaatctgagctcagcgcctgcttctctagacttcttgatgctcagaactcaaattccccactcacccatggctgcctggactctcttgcaagcacgacagacatctgccaagccaaacaggcccgaaaccactctggcaccaccatacccacattggaatgctgtcatgaagacatgtgcaattacagagggctgcacgatgttctctctcctcccaggggtgaggcctcaggacaaggaaacaggtatcagcatgatggtagcagaaaccttatcaccaaggtgcaggagctgacttcttccaaagagttgtggttccgggcagcggtcattgccgtgcccattgctggagggctgattntagtgttgcttattatgttggccctgaggatgcttcgaagtgaaaataagaggctgcaggatcagcggcaacagatgctctcccgtttgcactacagctttcacggacaccattccaaaaaggggcaggttgcaaagttagacttggaatgcatggtgccggtcagtgggcacg

SEQ ID NO: 11480 - DNA, 517 bp, Homo sapiens
ctgtttgttagggctgttagagggtgatcttcagttttacaggaagtgggtcacgggttaattttaaatgtgattccgaatctcctttcagtcctcgagaagggccaatgagcatttttcagcagtcacagccagtgtgagtgctgctctttccacctgccttgcaaattctgtttcccaggggaatgtgtctactgcctggtggttcaaaggttggaaggcagggcagaggtgggggctgattctgctgggacaggtcttccagaggcagcctccccccactgcctgtccccgtccccaccaggctgcccttgggatggaccttttcattcttttctttatattctagacagtctctgttgtctcattgtgttgctgtcccatttttcaggtgagggtaccggggtaggggagtggcctgcccagggtcacactatgagaggcccccacctgctgcctttggacgcagccccctgctgctgcatccaccacccttcttacagatcagcgcgcacat

SEQ ID NO: 11481 - DNA, 428 bp, Homo sapiens; identical to SEQ ID NO: 396

SEQ ID NO: 11482 - DNA, 434 bp, Homo sapiens
attggatttaatttcccaaacactgacattttagacaattttgcaaggactctgaatttttgcagggctatttttggatactgtaaaaaaaaaaaaaagaaacaacacacacacacacacacactcatagcagagctgctctgctcgctctaaggcctctttgagggaaggacagttccaaaaggcactgaccggtgacatgggtgggccctgcccctcctcaggcagccagctcagccatggccctgtccaaggggtccacagaccagtaatcatcatcccagccaaggaaccagcccacaaaggagggaggctcaaagccttgcttcaccacggtgatgggcgtccgccgatcccgattggctgggtccgtctcgatgtaccgcttagcagaagtcaaggcttctgtcttttcttcttcttgagaatccttt

SEQ ID NO: 11483 - DNA, 800 bp, Homo sapiens
  misc_feature 5, 7, 8, 16, 20, 23, 24, 26, 30, 75, 82, 93, 101, 117, 124,135, 142, 208, 210, 369, 414, 439, 441, 446, 480, 500, 528,553, 621, 627, 630, 656, 660, 679, 680, 686, 692, 693, 715,718, 743, 771: n = A,T,C or G
attgnanngaaatccnttcnacnngncccnttgcaggatccctcgattcgaattcggcacgagcccaccatcacngaggccntggtagcacgntttcgganaagccatccctgcctnagaagcngagcaggctgnggagcangaagcttcctgacatgggctgcagtcttcctgagcacagggcacaccaagaagcaagccataggcngntctgtgagtcaaagaatgggcccccttatccccagggagctggccagttagattatgggtccaaagggattccagacacttctgagccagtcagctaccacaactctggagtaaaatatgctgcatccgggcaagaatctttaagactgaaccacaaanaggtaaggctctccaaagagatggagcgaccctgggttaggcagncttctgccccagagaaacactccananactgntacaaggaggaagaacacctcactcagtcaatcntcccaccccctaaaccaganaggagtcatagcctgaaactccatcatncccagaacgtggagagggaccccantgtgctgtaccagtaccaaccacacggcaagcgccagagcagtgtgactgttgtgtcccagtatgatnacctgnaanattaccacttgctgcctcagcaccancgangagtcttttggagggggcnngtatgngggacnntttgtgccccccttgggttttnccnattcacaaaaagcaaggaccttatnctttcagcgttgggtcaagggggctttnctgccccccaaaatttttccttgcacatt

SEQ ID NO: 11484 - DNA, 300 bp, Homo sapiens
aggattgctcctgtactggacaccacagttccaaaagcttagtttggaactaagcagctgccattttcctctgatgacacatccagtggacagattatgaaaatctcagcaggtgtgcggtgtccttgtctcgtcaagcaccatcccagcacgtgcccccttgtttctgtgcaggtgtgtgtaactggtgtgtgcaccgtttcgaccatcactgtgtttgggtgaacaactgcatcggggcctggaacatcaggtacttcctcatctacgtcttgaccttgacggcctcggctgccaccg

SEQ ID NO: 11485 - DNA, 536 bp, Homo sapiens
attccgttgctgtcggcggtccgccggatctccagcgctcagtccgcgccgcaggtggtgcttgtctgcagagtcatgacctctttccgcttggccctcatccagcttcagatttcttccatcaaatcagataacgtcactcgcgcttgtagcttcatccgggaggcagcaacgcaaggagccaaaatagtttctttgccggaatgctttaattctccatatggagcgaaatattttcctgaatatgcagagaaaattcctggtgaatccacacagaagctttctgaagtagcaaaggaatgcagcatatatctcattggaggctctatccctgaagaggatgctgggaaattatataacacctgtgctgtgtttgggcctgatggaactttactagcaaagtatagaaagatccatctgtttgacattgatgttcctggaaaaattacatttcaagaatctaaaacattgagtccgggtgatagtttctccacatttgatactccttactgcagagtgggtctgggcatctgcta

SEQ ID NO: 11486 - DNA, 503 bp, Homo sapiens; identical to SEQ ID NO: 3098

SEQ ID NO: 11487 - DNA, 394 bp, Homo sapiens
ttccgtcagtacgcgaaggatatcggtttcattaagaaagacctgagctgtcttccttggcactgcctatggaggtgacacccatctcctccatcatggccatcctgagaccgctcgcgaagcccaagatcatcaaaaagagcaccaagttcactgggaaccagtcagactgatatgtcaaaattaagggtaactggtggaaacacagaggtattaacaacagggttcatagaaggtttgagggccagatctatgcccaacattggttatgggagaaacaaaaagacaaagcacatactgcccagtggcttctggaagttcctggtccacaacgttaaggagctggaagtactgctggtgagcaacaaatcttactgtgttgagatcactcatg

SEQ ID NO: 11488 - DNA, 100 bp, Homo sapiens
gttattcatgattcagctgatcttaacaaaattcgtagcagtggaaccttgaaatgcatgtggctagatttatgctaaaatgattctcagttagcatttt

SEQ ID NO: 11489 - DNA, 372 bp, Homo sapiens
gatggaagggagcatctggagggggggagcttccttgagcagtgggcccaggcctggccctccacacttcattctctgacctttctctctcctcatttcggtgcatgtcctttctgcagctgcctttcagcacaggtggttccactgggggcagctaacgctgagtgacaaggatgggaagccacaggtgcattttactcaagtcttctctagtcaatgaggggcacccagtgcttctagggcaggctgggtggtggtcccctacgtatcagcctctcttactgtactctccgggaatgttaacctttctattttcagcctgtgccacctgtctaggcaagctggcttccccattggcccctgtgggtccac

SEQ ID NO: 11490 - DNA, 360 bp, Homo sapiens
  misc_feature 9, 29: n = A,T,C or G
gaagggctnatgaatgcactatctattcnatgatgaagataccccaccaaacccaaaaaaagagatctctcgaggatccgaattccagatctatgaatcgtagatactgaaaaaccccgcaagttcacttcaactgtgcatcgtgcaccatctcaatttctttcatttatacatcgttttgccttcttttatgtaactatactcctctaagtttcaatcttggccatgtaacctctgatctatagaattttttaaatgactagaattaatgcccatcttttttttggacctaaattcttcatgaaaatatattacgagggcttattcagaagctttggacttcttcgccagaggtttggt

SEQ ID NO: 11491 - DNA, 578 bp, Homo sapiens
tgctgtcgggctcctacatctacgagaagcccctggcggaggggccgcaggtcaccggccccatcgaggtccccgcggcccgagcagaggagcggaaggcgagcggccccccgaaggggcccagcagagcctccagtgtcaccactttcaccggggagcccaacacgtgcccgcgctgcagcaagaaggtgtacttcgctgagaaggtgacgtctctgggcaaggattggcaccggccctgcctgcgctgcgaacgctgcgggaagacactgacccccggcgggcacgcggagcacgacggccagccctactgccacaagccctgctatggaatcctcttcggaccctgcgtgtccccgtggcgctgtccgctctccctctcctgctgcccacccacctgccagtgttatttatgctcccttcgtgggtgatggccacgccctcaccatgtccctggcagagggcttccctccgggatcccctgcctggtgcccacactgcctcgcaagcgctcgccaccctcacgtggctcacctgctgttgagccttgtgctgtcaataaacggtttgaggattgc

SEQ ID NO: 11492 - DNA, 396 bp, Homo sapiens
ggcacgaggcgccatggcgcctttcagttagttcttcaatgggggaaactggaagatgaacgggcggaagcagagtctgggggagctcatcggcactctgaacgcggccaaggtgccggccgacaccgaggtggtttgtgctccccctactgcctatatcgacttcgcccggcagaagctagatcccaagattgctgtggctgcgcagaactgctacaaagcgactaatggggcttttactggggagatcagccctggcatgatcaaagactgcggagccacgtgggtggtcctggggcactcagagagaaagcatgtctttggggagacagatgagctgattgggcacaaagtggcccatgctctggcatagggactcggagtaaacgcctgcag

SEQ ID NO: 11493 - DNA, 508 bp, Homo sapiens
cgatctacatgggccgcaacccccgggacgttgtggtctccctctatcattactccaagatcgccgggcagttaaaggacccgggcacacccgaccagttcctgagggacttcctcaaaggcgaagtgcagtttggctcctggttcgaccacattaagggctggcttcggatgaagggcaaagacaacttcctatttatcacctacgaggagctgcagcaggacttacagggctccgtggagcgcatctgtgggttcctgggccgtccgctgggcaaggaggcactgggctccgtcgtggcacactcaaccttcagcgccatgaaggccaacaccatgtccaactacacgctgctgcctcccagcctgctggaccaccgtcgcggggccttcctccggaaaggggtctgtggcgactggaagaaccacttcacggtggcccagagcgaagccttcgatcgtgcctaccgcaagcagatgcgggggatgccgaccttcccctgggatga

SEQ ID NO: 11494 - DNA, 506 bp, Homo sapiens
ccggctgagccgacggattttgcagcaagcacggcagcaacaggaggaactcgaggccgagcatgggactggggacaagcccgcggcgccgcgggaacgcaccacgcggctgggtccaagaatgcctcaggatggatcagatgacgaggacgaggagtggcccaccctggagaaggctgccacaatgacagcagcgggccatcatgcagaggtggttgtggaccctgaggatgagcgtgccatagagatgttcatgaacaagaaccctcctgccaggcgcaccctggctgacatcatcatggagaagctgactgagaagcagacagaggttgagacagtcatgtcagaggtgtcgggcttccctatgccccagctggacccccgggtcctagaagtgtacaggggggtccgggaggtattatctaagtaccgcagtggaaaactgcccaaggcatttaagatcatccctgcactctccaactgggagcaaatcctctacgtcacag

SEQ ID NO: 11495 - DNA, 369 bp, Homo sapiens
ggcacgagagaacctgatgtagcccctggccagataactgcctgatttctcagatattatttctctgggaaacattctacatagcacaggagcttaagagtggcattatcttctcgccttaatttccagagattatttctgtactgagaatcctggaactactatgctaggaaatttaaagctgcatgggctgtcttgtttacatttaattattgtgaatacctagaatctttcttggtcctgatttctcttgcttaatccagtctttatctgtaactgccccttatttgatcaccatgtactaggagctctgatagccagctcagctcctaatccttgaggcaacattctttttctatttgaacttca

SEQ ID NO: 11496 - DNA, 485 bp, Homo sapiens
gtggcacagtagactgtagtgtgaggctcgcgggggcagtggccatggaggccgtgctgaacgagctggtgtctgtggaggacctgctgaagtttgaaaagaaatttcagtctgagaaggcagcaggctcggtgtccaagagcacgcagtttgagtacgcctggtgcctggtgcggagcaagtacaatgatgacatccgtaaaggcatcgtgctgctcgaggagctgctgcccaaagggagcaaggaggaacagcgggattacgtcttctacctggccgtggggaactaccggctcaaggaatacgagaaggccttaaagtacgtccgcgggttgctgcagacagagccccagaacaaccaggccaaggaactggagcggctcattgacaaggccatgaagaaagatggactcgtgggcatggccatcgtgggaggcatggccctgggtgtggcgggactggccggactcatcggacttgctgtg

SEQ ID NO: 11497 - DNA, 413 bp, Homo sapiens; identical to SEQ ID NO: 3106

SEQ ID NO: 11498 - DNA, 267 bp, Homo sapiens; identical to SEQ ID NO: 403
  misc_feature 233, 238, 245, 249, 251, 261, 262, 266: n = A,T,C or G

SEQ ID NO: 11499 - DNA, 514 bp, Homo sapiens; identical to SEQ ID NO: 3107
  misc_feature 232: n = A,T,C or G

SEQ ID NO: 11500 - DNA, 309 bp, Homo sapiens
gaagccagccatcttaaaactctgtttgtcaaaggcctgtctgaggataccactgaagagacattaaaggagtcatttgacggctccgttcgggcaaggatagttactgaccgggaaactgggtcctccaaagggtttggttttgtagacttcaacagtgaggaggatgccaaagctgccaaggaggccatggaagacggtgaaattgatggaaataaagttaccttggactgggccaaacctaagggtgaaggtggcttcgggggtcgtggtggaggcagaggcggctttggaggacgaggtggtggt

SEQ ID NO: 11501 - DNA, 546 bp, Homo sapiens
aatttgccttgaatttcaaccccagtaacccctactgtgcaggcatccagggcattgtggatgcctaccgccaagccctgccccaagttcgcctctatggccctaccaactttgcacccatcatcaaccatgtggccaggtttgcagcccaggctgcacatcaggggactgcctcgcaatacttcatgctgttgctgctgactgatggtgctgtgacggatgtggaagccacacgtgaggctgtggtgcgtgcctcgaacctgcccatgtcagtgatcattgtgggtgtgggtggtgctgactttgaggccatggagcagctggacgctgatggtggacccctgcatacacgttctgggcaggctgctgcccgcgacattgtgcagtttgtaccctaccgccggttccagaatgcccctcgggaggcattggcacagaccgtgctcgcagaagtgcccacacaactggtctcatacttcagggcccagggttgggccccgctcaagccacttccaccctcagccaaggatcctgcacaggcccccc

SEQ ID NO: 11502 - DNA, 697 bp, Homo sapiens
  misc_feature 353, 630, 653, 676, 690: n = A,T,C or G
ggcacgaggtgacgggtgaagcagatgttgagtttgctactcatgaagaagctgtggcagctatgtccaaagacagggccaatatgcagcacagatatatagaactcttcttgaattcaacaacaggggccagcaatggggcgtatagcagccaggtgatgcaaggcatgggggtgtctgctgcccaggccacttacagtggcctggagagccagtcagtgagtggctgttacggggccggctacagtgggcagaacagcatgggtggctatgactagttttgttaggaacatttgagttacttcaatcattttcacaggcagccaacaagcaattaagagcagttataatanaggaagctgggggacccattttgcaccatgagtttgtgaaaaatctggattaaaaaattacctcttcagtgttttctcatgcaaaattttcttctagcatgtgataatgagtaaactaaaactattttcagcttttctcaattaacattttggtagtatacttcagagtgatgttatctaagtttaagtagtttaagtatgttaaatgtggatcttttacaccacatcacaagtgaacacactggggagacgtgctttttttggaaaactcaaaagngctagctcctgattcaaagaaanatttctcatgttggtcattctangtttatattttcanttaaaat

SEQ ID NO: 11503 - DNA, 360 bp, Homo sapiens
tcattctgtggaattttgtgcttactactgtatagtgcatgtggtgtaggttactctaactggttttgtcgacgtaaacatttaaagtgttatattttttataaaaatgtttatttttaatgatatgagaaaaattttgttaggccacaaaaacactgcactgtgaacattttagaaaaggtatgtcagactgggattaatgacagcatgattttcaatgactgtaaattgcgataaggaaatgtactgattgccaatacaccccaccctcattacatcatcaggacttgaagccaagggttaacccagcaagctacaaagagggtgtgtcacactgaaactcaatagttgagtttggct

SEQ ID NO: 11504 - DNA, 550 bp, Homo sapiens
aaacctgcgccctggcctctcactccgggagctcaggctccaagtcgggaggcgacaagatgttctccctcaagaagtggaacgcggtggccatgtggagctgggacgtggagtgcgatacgtgcgccatctgcagggtccaggtgatggatgcctgtcttagatgtcaagctgaaaacaaacaagaggactgtgttgtggtctggggagaatgtaatcattccttccacaactgctgcatgtccctgtgggtgaaacagaacaatcgctgccctctctgccagcaggactgggtggtccaaagaatcggcaaatgagagtggttagaaggcttcttagcgcagttgttcagagccctggtggatcttgtaatccagtgccctacaaaggctagaacactacaggggatgaattcttcaaataggagccgatggatctgtggtcctttgggactcatcaaagccttggtttagcattttgtcagttttatcttcagaaattctctgcgattaagaagataatttattaaaggtggtccttcctacctctg

SEQ ID NO: 11505 - DNA, 443 bp, Homo sapiens; identical to SEQ ID NO: 2999

SEQ ID NO: 11506 - DNA, 623 bp, Homo sapiens; identical to SEQ ID NO: 2763
  misc_feature 537: n = A,T,C or G

SEQ ID NO: 11507 - DNA, 495 bp, Homo sapiens
ggcttagcggataacaatttcacacaggatgatgctaccaatcaatactcatcattaataatcataatggctatagcaataaaactaggaatagccccctttcacttctgagtcccagaggttacccaaggcacccctctgacatccggcctgcttcttctcacatgacaaaaactagcccccatctcaatcatataccaaatctctccctcactaaacgtaagccttctcctcactctctcaatcttatccatcatagcaggcagttgaggtggattaaaccaaacccagctacgcaaaatcttagcatactcctcaattacccacataggatgaataatagcagttctaccgtacaaccctaacataaccattcttaatttaactatttatattatcctaactactaccgcattcctactactcaacttaaactccagcaccacgaccctactactatctcgcacctgaaacaagctaacatgactaacaccc

SEQ ID NO: 11508 - DNA, 124 bp, Homo sapiens
gggtttttaaaggttattaaaaacccaccttaaaatgggcctccaaactttaccctaaaagggtttaaaacccaagggttaaaatccttttgcaaccgggcaaaaaaaacccttttttcttttt

SEQ ID NO: 11509 - DNA, 150 bp, Homo sapiens
ggcttgtaatacgactcactatagggcttttttttttttaaagtgggaaaacccttttttgggcccaggctttccttgtaaactggacggggggaacctattttttcaaaaccagaaaaagcgggtttccccaaaactatttcccttggg

SEQ ID NO: 11510 - DNA, 385 bp, Homo sapiens
ggtacaacattgatgttttaatatagaatgaagtgcttgctacacagtcaagtaaatcaacatatccattaccacacacacttttcttttctgaggagcggtaagagtactttaattttgcagttattgattaattaaaaaacacagttgttttcagcatttcctagttacagtagtgcataggaaattccattctaaacaaagaagtaattaatgaaataacaacacaccttaacattttacattgataggttacagtttacaaggtgctttcacatacattatttcatttgattcttacaacaagcagaaaaaacagtgggaaagattttttttttcaggcttacaatgagtattttcaggccaatgggcagttaacacaagg

SEQ ID NO: 11511 - DNA, 392 bp, Homo sapiens; identical to SEQ ID NO: 3113
  misc_feature 392: n = A,T,C or G

SEQ ID NO: 11512 - DNA, 541 bp, Homo sapiens
ggcacgaggtggaggcagctaaaagccatctcatctttcaccgtattcaacaagcccattataacaagtctttcacgctcaaccattcaaacaatcccaacaatcccagcctaagaatttcctggcatttgatgaaaatggctgtgggttttgctatctttaagctccctgcgaagcatgatataagcccacggctggcaggctctttctagctacctgctcttgcacatagagtttgcctcatggttgcaagaaagctgccatagctccagatggcacatagacattccaggcagcaggaaaaaggaaggagcacttaaccgaaggaggtcagggagttggttagtctccacctgaagaagagagccatgaaccagcttcagttgactaacgggctcctgtgagtgcatctttggacttttctggaggttgaaatctacatgtggtatgtgtcttaaagcagccaccaactgctcccattaccttccaagtgagcccaactacacgatggagcctcttccctgcccttggatctgggctg

SEQ ID NO: 11513 - DNA, 539 bp, Homo sapiens
ggcacgagggatccagtttcctggtcatccccttagcagttcacaagttcctggcaaatgttccaaagcaaaaagcgattgcaattagcatccagttcctgcagcctggtgctctgccctgcacgtcagggttggcatccacccagatccagatggaagggaaacttctctcttctcctttgcctcctcttccctcaccagagcagggcgcttctcttggggtggtgagaaggatcttcgagaaatcgtgttcagtatttcaagctctatttctgtggcacatgtcttttgagaggcatcttcacctcttctgtgatgacttggtatgttgtttggtagagagatcttgattttcggaggatcttgcatttttctagggaatattttgtagttgtgtgtgtgtgtttttgccttggtccccattatgggatgcattaggactggcctatgcatcgaaaatctttttgtttgtaaacgtttaaaaacaaagttccccggccaggcacagtggctcacacctgtaatcccagcactttggg

SEQ ID NO: 11514 - DNA, 564 bp, Homo sapiens; identical to SEQ ID NO: 3116

SEQ ID NO: 11515 - DNA, 626 bp, Homo sapiens
ttgaggaattccttagtaaagtctctattttagagtctctggacaagtgggaacgtcttacggtagctgatgcattggaaccagtgcagtttgaagatgggcagaagattgtggtgcagggagaaccaggggatgagttcttcattattttagaggggtcagctgctgtgctacaacgtcggtcagaaaatgaagagtttgttgaagtgggaagattggggccttctgattattttggtgaaattgcactactgatgaatcgtcctcgtgctgccacagttgttgctcgtggccccttgaagtgcgttaagctggaccgacctagatttgaacgtgttcttggcccatgctcagacatcctcaaacgaaacatccagcagtacaacagttttgtgtcactgtctgtctgaaatctgcctcctgtgcctcccttttctcctctccccaatccatgcttcactcatgcaaactgctttattttccctacttgcagcgccaagtggccactggcatcgcagcttcctgtctgtttatatattgaaagttgcttttattgcaccattttcaatttggagcattaactaaatgctcatacacagttaaataaatagaaagagttctatgga

SEQ ID NO: 11516 - DNA, 490 bp, Homo sapiens
tttagcttagggcctggtggctaggtcggttctctcctttccagtcggagacctctgccgcaaacatgctccgccagatcatcggtcaggccaagaagcatccgagcttgatccccctctttgtatttattggaactggagctactggagcaacactgtatctcttgcgtctggcattgttcaatccagatgtttgttgggacagaaataacccagagccctggaacaaactgggtcccaatgatcaatacaagttctactcagtgaatgtggattacagcaagctgaagaaggaacgtccagatttctaaatgaaatgtttcactataacgctgctttagaatgaaggtcttccagaagccacatccgcacaattttccacttaaccaggaaatatttctcctctaaatgcatgaaatcatgttggagatctctattgtaatctctattggagattacaatgattaaatcaataaataactgaaacttg

SEQ ID NO: 11517 - DNA, 502 bp, Homo sapiens
aattccgttgctgtcgggtcctccgggacttggaacgccctggctgggtggtgtccgggcgtcctttccgcgcttcttcccacctcggctggtcccgtttcctcctgcgcccagtgcggacctgtctcggcgcccgctgccctctcaccgccccacgcaggatcccggcctggtcaccgggcagtgtgatgcttcccgactgccgcggggacagcgaggcacacacagggcttgggccgcgccggaggccacacggcctggctgagttgctcctggtctcccgcctgtcccaggcgacccggatgtagcatttcccaggaggcacggtcccccccatggggatgggcacagtcacgccagatggacgagaagaccaagaaagcagaggaaatggccctgagcctcacccgagcagtggcgggcggggatgaacaggtggcaatgaagtgtgccatctggctggcagagcaacgggtgcccctgagtgtgcaactgaagcctg

SEQ ID NO: 11518 - DNA, 300 bp, Homo sapiens; identical to SEQ ID NO: 437

SEQ ID NO: 11519 - DNA, 556 bp, Homo sapiens; identical to SEQ ID NO: 3117

SEQ ID NO: 11520 - DNA, 493 bp, Homo sapiens
aattccgttgctgtcgcaaggggatggggctgtgggggcggtgcggcatgggcttcaaaagtatctgcacaattagaaaagtcctcagaagctttttcttggagggtacactttcttcactgtccctattcctagacctggggcttgagctgaggatgggacgatgtgcccagggagggacccaccagagcacaagagaaggtggctacctgggggtgtcccagggactctgtcagtgccttcagcccaccagcaggagcttggagtttggggagtggggatgagtccgtcaagcacaactgttctctgagtggaaccaaagaagcaaggagctaggacccccagtcctgccccccaggagcacaagcagggtcccctcagtcaaggcagtgggatgggcggctgaggaacggggcaggcaaggtcactgctcagtcacgtccacgggggacgagccgtgggttctgctgagtaggtggagctcattgctttc

SEQ ID NO: 11521 - DNA, 270 bp, Homo sapiens
ccgttgctgtcggtgggctggcccctggtgtgagcattagaccagccacagtgcctgattggtatagccttatgtgctttcctacaaaatggaattggaggccgggcgcagtggctcacgcctgtaatcccagcactttgggaggccaaggtgggtggatcacctgaggtcaggagctcgagaccagcctggccaacatggtgaaaccccatctctactaaaaatacaaaaattagccaggtgtgatggtgcatgcctgtaatcccagct

SEQ ID NO: 11522 - DNA, 460 bp, Homo sapiens
attccgttgctgtcggatggcgctagcggttggagcaggggctctgctgcgacctttacggtagtgaggttagggacgatgggagagcagctttgttcctgaagtgccgtcgaggattaggatcgagtttcttcgatcgtgagggcaattattagtggcctctagccccccagatggcatcttgaggagagagaatccacgctacgagaactaacatagtggacatcgcagttgtccgtagccgatttgcgggttacggagttgttgcaagtaaagaaggggaaatccgagcgttctcgcgttggatttcctccacgtgtgaagtgggaatggtagtgatatctcgtgctatctctgtcaagggcaagaaggagaaggaatttatttgaggccctacgacgtggtgcggtggctcacgcctgtaatcccaacactttgggaggccgaggcacgcggatca

SEQ ID NO: 11523 - DNA, 575 bp, Homo sapiens
tcggccgccgcctcctttcgtgtgccgctatgggagtcccggcgttcttccgctggctcagccgcaagtacccgtccatcatagtcaactgcgtggaagagaagccaaaagaatgcaatggtgtaaagattccagttgatgccagtaaacctaatccaaatgatgtggagtttgataatctgtatttggatatgaatggaatcatccatccctgtactcatcctgaagacaaaccagcaccaaaaaatgaagatgaaatgatggttgcaatttttgagtacattgacagacttttcagtattgtaagaccaagaagacttctctacatggcaatagatggagtggcaccacgtgctaaaatgaaccagcagcgttcaaggaggttcagggcatcaaaagaaggaatggaagcagcagtcgagaagcagcgagtcagggaagaaatattggcaaaaggtggctttcttcctccagaagaaataaaagaaagatttgacagcaactgtattacaccaggaactgaattcatggacaatcttgctaaatgccttcgctattacatagctgatcgttta

SEQ ID NO: 11524 - DNA, 609 bp, Homo sapiens
tcggcctggcccaagccctgacgatttcagtgttgttttctgcacgcgcaaaacacctggggaccgaggggatggcagtggcatcctatctttgacagctctgaacgagcttaaccttttttttcagacccctttgctgatgcaagtaagggtgatgacctgcttcctgctggcactgaggattatatccatataagaattcaacagagaaacggcaggaagacccttactactgtccaagggatcgctgatgattacgataaaaagaaactagtgaaggcgtttaagaaaaagtttgcctgcaatggtactgtaattgagcatccggaatatggagaagtaattcagctacagggtgaccaacgcaagaacatatgccagttcctcgtagagattggactggctaaggacgatcagctgaaggttcatgggttttaagtgcttgtggctcactgaagcttaagtgaggatttccttgcaatgagtagaatttcccttctctcccttgtcacaggtttaaaaacctcacagcttgtataatgtaaccatttggggtccgcttttaacttggactagtgtaactccttcatgcaataaactgaaaagagc

SEQ ID NO: 11525 - DNA, 453 bp, Homo sapiens
agaatacaggagaatctgaagctagtggaaataaagagatgattgaagcactaaagcaatatgctatggactattcgaataaagctcttgagaagggactgaatcctctgaatgcatactccgatctcgctgagttcctggagacggaatgttatcagacaccattcaataaggaagtccctgatgctgaaaagcaacaatcccatcagcgctactgcaaccttcagaaatataatgggaagtctgaagacactgctgtgcaacatggtttagagggtttgtccataagcaaaaaatcaactgacaaggaagagatcaaagaccaaccacagaatgtatctgaaaatctgcttccacaaaatgcaccaaattattggtatcttcaaggattaattcataagcagaatggagatctgctgcaagcagccaaatgttatgagaaggaactgggcc

SEQ ID NO: 11526 - DNA, 552 bp, Homo sapiens; identical to SEQ ID NO: 3121

SEQ ID NO: 11527 - DNA, 590 bp, Homo sapiens; identical to SEQ ID NO: 3122
  misc_feature 362: n = A,T,C or G

SEQ ID NO: 11528 - DNA, 300 bp, Homo sapiens
aattccgttgctgtcggtggagggccgcccgaagggcactctcggacattaacccgcattctggtgggtctagaggaaattggcggacgaagagtggcagcactgacctggtctgggacgtggggagaagggtgcgctacctgggtttcaggtgggagggcgttcggtcgggcctccagggggatagcgggggtgcttgagtcgcgggtgctgagtcgggagtgctgagtgagttgcgggtgctgagttgaggctgtgccctttcccactataatacgccaagcgtgcgttctgccgttc

SEQ ID NO: 11529 - DNA, 519 bp, Homo sapiens; identical to SEQ ID NO: 3124

SEQ ID NO: 11530 - DNA, 501 bp, Homo sapiens; identical to SEQ ID NO: 3125

SEQ ID NO: 11531 - DNA, 387 bp, Homo sapiens
cccctcgctgacatccaccccagtgtgcagccagaaggtggtggtcaccacaccactgcaccgggacaagacacccctgcaccagaaacatgctgcgtttgtaaccccagatcagaagtactccatggacaacactccccacacgccaaccccgttcaagaacgccctggagaagtacggacccctgaagcccctgccacagaccccgcacctggaggagacttgaaggaggtgctgcgttctgaggctggcatcgaactcatcatcgaggacgacatcaggcccgagaagcagaagaggaagcctgggctgcggcggagccccatcaagaaagtccggaagtctctggctcttgacattgtggatgaggatgtgaagctgatgatg

SEQ ID NO: 11532 - DNA, 436 bp, Homo sapiens; identical to SEQ ID NO: 416

SEQ ID NO: 11533 - DNA, 525 bp, Homo sapiens
ggtcgtccctgccctccccggccccggggtgcaccccgcaaggctcccgctggtgtccctggagcatgggaggctgctgagcgtgagtggcggtgtctggcaggagctgcgtggcagggagggcgtccatggctgcagccaacaagggcaacaagcccagagtccggagtatccgctttgcggcaggccacgatgcagaaggatcccacagccacgtccactttgatgagaagctgcatgactcggtggtcatggtcacccaggagagtgacagcagctttctggtcaaggttggcttcctgaagatcctgcacaggtatgagattaccttcactctgcccccagtgcacaggctgagcaaggatgtccgcgaggcacctgtccccagcctgcacctcaagctcctcagcgtggtgcccgtccctgaaggttatagtgtcaagtgtgagtactcggcgcacaaagagggcgtcctcaaagaggagatactgctagcctgcgaaggtggcactggcacctgtgtgc

SEQ ID NO: 11534 - DNA, 354 bp, Homo sapiens
ggcacgaggctggaagacatggccactccagtcggtgttgagcacggcgagcagtctcaggcctttagtgatgatggtgcagtcagcctcagtttccaaagccggaaaaggatcctctagtagccacggtgtggcagctgctctgaaccaggacctggacccggacccaaagtgccatgtctttaatgttagctcccagcgatgccaatgggatcagcacagccctgcctctgctgctaattgttcctctaaagtaatcgccatgcgttctttgggcttcatctttaaaggaatgaagcaactgagattattctggaaaaccttttggcagttagtgaaattagagtacaacta

SEQ ID NO: 11535 - DNA, 376 bp, Homo sapiens; identical to SEQ ID NO: 3126

SEQ ID NO: 11536 - DNA, 321 bp, Homo sapiens; identical to SEQ ID NO: 3128

SEQ ID NO: 11537 - DNA, 504 bp, Homo sapiens
caatttgttctgcttagtcattacttttaattcttttcttactaaaattttatggtggttgggggaagggagttagcatcactaacctgacagttgttgccaggaatttgctttgtttactgctagtatattagaaatcctagatctcagaatcacaatagtaataaacaacaggggtcattttttcctaacttactctgtgttcaggtgtggaatttctgtctcccaagaggaaatgtgacttcactttggtgccaatggacagaaaattctacctgtgctacataggagaagtttggaatgcacttaatagctggtttttacaccttgatttcgaggtggaaagaaattgatcatgaatctctaataaatttaaatctcttaaaccagtaggtgcttaatattttttgatttgattaatgcccatttaaatctcatgggttctattaaaaatatatatatatagggccccaatccattgccatcaaattgcccttggacttt

SEQ ID NO: 11538 - DNA, 388 bp, Homo sapiens
ggcacgagaccacgtccagttcttcagcagactcaactatcatggacattcaggtcccgacacgagccccagatgcagtctacacagaactccagcccacctctccaaccccaacctggcctgctgatgaaacaccacaaccccagacccagacccagcaactggaaggaacggatgggcctctagtgacagatccagagacacacaagagcaccaaagcagctcatcccactgatgacaccacgacgctctctgagagaccatccccaagcacagacgtccagacagacccccagaccctcaagccatctggttttcatgaggatgaccccttcttctatgatgaacacaccctccggaaacgggggctgttggtcgcagctgtgct

SEQ ID NO: 11539 - DNA, 579 bp, Homo sapiens
ggcacgagccagagccttctctctcctgtgcaaaatggcaactcttaaggaaaaactcattgcaccagttgcggaagaagaggcaacagttccaaacaataagatcactgtagtgggtgttggacaagttggtatggcgtgtgctatcagcattctgggaaagtctctggctgatgaacttgctcttgtggatgttttggaagataagcttaaaggagaaatgatggatctgcagcatgggagcttatttcttcagacacctaaaattgtggcagataaagattattctgtgaccgccaattctaagattgtagtggtaactgcaggagtccgtcagcaagaaggggagagtcggctcaatctggtgcagagaaatgttaatgtcttcaaattcattattcctcagatcgtcaagtacagtcctgattgcatcataattgtggtttccaacccagtggacattcttacgtatgttacctggaaactaagtggattacccaaacaccgcgtgattggaagtggatgtaatctggattctgctagatttcgctaccttatggctgaaaaacttggcattca

SEQ ID NO: 11540 - DNA, 476 bp, Homo sapiens
ggcacgaggttaggatggctgtagtacctctgctgttgttggggggtttgtggagcgctgtgggagcgtccagcctgggtgtcgttacttgcggctccgtggtgaagctactcaatacgcgccacaacgtccgactgcactcacacgacgtgcgctatgggtcaggtagtgggcagcagtcagtgacaggtgtaacctctgtggatgacagcaacagttactggaggatacgggggaagagtgccacagtgtgtgagaggggaacccccatcaagtgtggccagcccatccggctgacacatgtcaacactggccgaaacctccatagtcaccacttcacttcacctctttctggaaaccagtgagtgcttttggtgaggaaggtgaaggtgattatctggatgactggacagtgctctgtaatggaccctactgggtgagagatggtgaggtgcggttcaaacactcttccactg

SEQ ID NO: 11541 - DNA, 485 bp, Homo sapiens; identical to SEQ ID NO: 3131

SEQ ID NO: 11542 - DNA, 463 bp, Homo sapiens; identical to SEQ ID NO: 3133

SEQ ID NO: 11543 - DNA, 333 bp, Homo sapiens
ggcacgagggaacgtcatcgtttggaaagcgtcgcaataagacgcacacgttgtgccgccgctgtggctctaaggcctaccaccttcagaagtcgacctgtggcaaatgtggctaccctgccaagcgcaagagaaagtataactggagtgccaaggctaaaagacgaaataccaccggaactggtcgaatgaggcacctaaaaattgtataccgcagattcaggcatggattccgtgaaggaacaacacctaaacccaagagggcagctgttgcagcatccagttcatcttaagaatgtcaacgattagtcatgcaataaatgttctggtttt

SEQ ID NO: 11544 - DNA, 436 bp, Homo sapiens
ggcttgtaatacgactcactatagggctttttttttttcaataaatctcctaaggggatggctaccttttctatctaaataataatatatagacctattcgatcagagatacaggggactaacaatcacaatcctgtgatcgacatccgaacataagtcactatctatcagaataaacaatgatccaacgaataatagaggagtaagtggacatgtccaaagcatcaggtttcatcatgatcgagaaccgctgtcaagcaagacacaaacaaacaaaacagctttacacacaagtcagcagtccaagcgttcatgtcccaaggtcaaatgtaatcatcctgtcataagtcctcggccattgaaaaccaaataaatcgtcgtttaaacgcgctccacaaattgagcatttccagtattcttccttgtactggggctc

SEQ ID NO: 11545 - DNA, 85 bp, Homo sapiens
gagtgagagtgtaaacagtgtagggggtggttgagagtaagaaacccggagccttgtgccttgagactcctggaaagactcaatg

SEQ ID NO: 11546 - DNA, 405 bp, Homo sapiens
  misc_feature 387: n = A,T,C or G
cgttgctgtcgggtgacccagccgtctatgccgaaagggctggctatgataaactgtggcacccagcttgttttgtctgcagcacctgccatgaactcctggctgacatgatttatttttggaagaatgagaagctatactgtggcagacattactgtgacagcgagataccccgatgtgctggctgtgacgagctgatattcagcaatgaggatacccaggcagaaaaccagaaatggcacctgaaacacttctgctgctttgactgtgatagcattctagctggggagatatacgtgatggtcaatgacaagcccgtgtgcaagccctgctatgtgaagaatcacgctgtggtgtgtcaaggatgccacaatgccatcgacccanaagtgcagcgggtgacct

SEQ ID NO: 11547 - DNA, 409 bp, Homo sapiens
cgttgctgtcgcaaggatctccattctccctgtctggatacttctttggcagagatatgtcctttaggaaaaaatctcagctctaaagttaattcagacagcggtattccaggactagcagccagtgccttacttgtgagtcacggtgcttacatcagaagcctgtttgactattttctgactgaccttatgtgtgccttaccagccactctgagcatatatgaacgtatgtcagttactcccaatacagggatgagtctctctatcatacactttcgtgacggaatgagaagttaaaccaacggttcagtgtattcgtatgaacctacaggatcatcgaaatggactgactgatactcgctgcggataaatctgcatcactatctaaccattttgagcctctgaaggg

SEQ ID NO: 11548 - DNA, 462 bp, Homo sapiens
ccgttgctgtcgctttcttcttgcacctaaaagtggtgtctgggtgcaaatgtaagcagtggtggatccagaaatatgagctttgtgtaataagcttcttaaaacagtcctttcttacacctgcccagggccagaccctcggtcttggcctttttcaggagctaggatatctgcgcctggtgaaaatgaaacgaattcctgatttaggaattcagtgtttcctcctcactccagctaagcactcactttttttttttttttttaaaaaaaaatttttttttttcccccagggggggggggagggggggaattttggtttattgaaacccccccccccgggggtaaaagaatttttttgcccacccccccggaaaaaaggggaaaaaagggttgcccccccttgcccaattttttttttttttttttaaaaaaaaaatttttttttttcccccgggggggggg

SEQ ID NO: 11549 - DNA, 557 bp, Homo sapiens
ttccgttgctgtcgcttatgtttcaaagagaatttgccctccgactggttgcaaaacctggagataagttatactgcagactctcaattaatacacagctgttggcacgtgtggaccatctaatgaaagtgggaaagaataacttcagaccaccgcccaaggtggaatccagtgttgtaaggatagaacctaagaatccaccaccacccatcaattttcaggaatgggatggtctagtaaggataacctttgttaggaaaaacaagacactctctgctgcatttaaatcaagtgcagtgcaacaactcttggaaaaaaactacagaattcactgttcagtccataatattataataccagaagatttcagcatagcagataaaatacagcaaatcctaaccagcacaggttttagtgacaaacgggcccgttccatggacatagatgacttcatcagattgctacatggattcaacgcagaaggtattcatttttcctaggtatttggaaaacagaaattttcaaggtcaagaaaagaaatgaattttgtatttttt

SEQ ID NO: 11550 - DNA, 502 bp, Homo sapiens
ccgttgctgtcgggcggccgtgtggcgcggctgctcgccccactaatgtggcgcagggcggtttcctcggtggcggggtccgcggttggagccgagcccgggcttcggctgctggccgtgcagcggcttcccgtaggagcagcgttctgccgggcttgccagaccccaaactttgtccgcggcctgcacagcgagcctgggctggaggagcgggcggaggggacggtcaacgagggacgcccagaatcggacgcggcagatcatactggtcccaagtttgacatcgatatgatggtttcacttctgaggcaagaaaatgcaagagacatttgtgtgatccaggttcctccagaaatgagatatacagattactttgtgattgttagtggaacttctacccgacacttacatgccatggccttctacgttgtgaaaatgtacaaacacctgaaatgtaaacgtgaccctcatgttaagatagaagggaaggacactgatgact

SEQ ID NO: 11551 - DNA, 213 bp, Homo sapiens
ctgggattacacgcgcccaccaccatgcctggttaattgtttatttatagtggagacggggtttcaccatgttgaccagactggtctcgaacttctgacctcaagtgatccgcccgcctcggccactaaaagtgctggaattacaggcgtgagccaccatgcccggccccatttcctttattttatttattatttcgagaaggagtttcgctc

SEQ ID NO: 11552 - DNA, 586 bp, Homo sapiens
ccgttgctgtcgggcggtgacggcgtcaccctcaccagctctggaaaaagatccactggaaactaggccgggaagcagcagcccctccaagggccagggcacctgggagacgggaggattccagaacagcagcactgagctcccacccgcagagcctctggacggccttggcaacagcaaaatcatgggacaacacctctctccacggaaaggtcacagtggacagcccgggcagtaggatgcagccccagaggctggtggcagtttcctgtccattggtaggtgacggcccctggctcaggcagagggagatggttagactcttgcagggctaaaactctaatttggaattgaatattgtggatatcttagttaaaggccatgcttacagcttagaaatgaagccttaagctgcatcaagttacgaagtgattaatttccttctcagcaaacctccgggaggttccagaatgagttcttcctgacaggttgtcttcactgggagcgtggggcccccaggccccaccagcaccgtcctcccctaatgaggggccctgccgaggcatcagctgctctgctcagttag

SEQ ID NO: 11553 - DNA, 50 bp, Homo sapiens
gcctggttcacaggcttagtgatggagatatgacctcagccctaaggggg

SEQ ID NO: 11554 - DNA, 422 bp, Homo sapiens
cgccgagtggttcccagcgacctgtatcccctcgtgctcggtttcctgcgcgataaccaactctcagaggtggccaataagttcgccaaagcgacaggagctacacagcaggatgccaatgcctcttccctcttagacatctatagcttctggctcaagtctgccaaagtcccagagcgaaagttacaagcaaatggaccagaggctaataaagctaagaagaaggcctcatccagtgacagtgaggacagcagcgaggaggaggaggaagttcaagggcctccagcaaagaaggctgctgtacctgccaagcgagtcggtctgcctcctgggaaggctgcagccaaagcatcagagagtagcagcagtgaagagtccagtgatgatgatgatgaggaggaccaaaagaaacagcctgtcca

SEQ ID NO: 11555 - DNA, 50 bp, Homo sapiens
taaccggccggaagtttttcgtaggcctctccaaatggaccaatcaccga

SEQ ID NO: 11556 - DNA, 376 bp, Homo sapiens
cgttgctgtcggtggcattacaattagtagtgggcattacactgcttctgttaaagtcactgaccttaacagtttagaactagataaaggaaattttgtggttgaccaaatgtgtgaaataggtaagccagaaccattgaatgaggaggaagcaaggggtgtggttgagaattataatgatgaagaagtgtcaattagagttggtggaaatacacagccaagtaaagttttgaacaaaaaaaatgtagaagctattggacttcttggaggacaaaagagcaaagcagattatgagctatacaacaaagcctctaatcctgataaggttgctagtacagcgtttgctgaaaatagaaattctgagactagtgatact

SEQ ID NO: 11557 - DNA, 372 bp, Homo sapiens
ttttgcattaagaaagctttatgttaaagtatgaacagcatttccaataaaacatgaaaagattcatattgtatctacaaaatttaagtctttgctacaataaatgctatatttcttttaaacaagcctaagaaggtaaggaatgtcatgatcaatccgtacattctctttgcagcataagcctggagactttgatgtttaaattggacaatcatagatgtgaatttcctggtcatctccaacagacacaatttttgaaccatttccattgtattttactccccagacctgatcctggtgatcaaagaaggtgtgaacacaagtcctcgttccaacatcccaaacttttacacttttgtcagacgaactgga

SEQ ID NO: 11558 - DNA, 219 bp, Homo sapiens
ctatctgcccaccttggcctcccaagtgctgggattacaggtgtgagccactgtgcccggcctgtattgttttaagttacacttattccttttaaaattcagaatttgttaagcatttaaaacaaattcataaattaaaacctccttgagataccatttaccatgtagtttgatgaacataatacatggtgcattacattggcaaaagcaggggggaaa

SEQ ID NO: 11559 - DNA, 633 bp, Homo sapiens
  misc_feature 487, 600, 606, 614: n = A,T,C or G
acgcgggggttgcaccatggcgtccatggggaccctcgccttcgatgaatatgggcgccctttcctcatcatcaaggatcaggaccgcaagtcccgtcttatgggacttgaggccctcaagtctcatataatggcagcaaaggctgtagcaaatacaatgagaacatcacttggaccaaatgggcttgataagatgatggtggataaggatggggatgtgactgtaactaatgatggggccaccatcttaagcatgatggatgttgatcatcagattgccaagctgatggtggaactgtccaagtctcaggatgatgaaattggagatggaaccacaggagtggttgtcctggctggtgccttgttagaagaagcggagcaattgctagaccgaggcattcacccaatcagaatagcccgatggctatgagcaggctgctcgcgttgctattgaacacctggacaagatcagcgatagcgtccttgntgacataaaggacaccgaacccctgattcagacagcaaaaaccacgctgggctccaaaagtggtcaacagttgtcaccgacagatggctgaaaatgctgtgaatgccgtcctnctgtancagatatngaaccggaaaagaccttga

SEQ ID NO: 11560 - DNA, 173 bp, Homo sapiens; identical to SEQ ID NO: 3140

SEQ ID NO: 11561 - DNA, 645 bp, Homo sapiens
  misc_feature 493, 548, 605, 607, 644, 645: n = A,T,C or G
ggtacagggaaggcctttcgggcagggcacatggttcactgccccatgacgtgataccttgaagcacaccattacagacaagtgggcccccagaatcacccgagcaggtgcttttgccccctgtccagcgtccagcacacagcatgaacttggtcaccttctgagggtgaacttgcgcacacacgtcattggaaataacatggaggtccacacactgaagtttctttggggtcaagaactcctctggttcaatgctgccccagcctgaggcgtagcaggtggtccccagtgctggctcctgggtgggcaggtccatgaccttcacagcatccgtgagctcggcaggctccgacaggcggagcagcatgaggtcgtggctggagtcatcacctggcctgaggaatcgattcttcaggaggctcatatcgtagagcgggtgtgggaagctgtggctgacctgaaatacctggcctgtgtcttcaggatgaaacangctgtgccaacccagcaagatcacgcttttggtcctgatgcaatgggcaactgtnaaggacccacttgggggtgcaccagaacaaccggccgaaaactggccttgccacgananggcccaagcaccttgccagggttgggaatgctttttnn

SEQ ID NO: 11562 - DNA, 364 bp, Homo sapiens
ggcacgaggccggctccagggccatgaagcccccaggaggagaatcgagcaatctttttggaagtccagaagaagctactccttccagcaggcctaataggatggcatctaatatttttggaccaacagaagaacctcagaacatacccaagaggacaaatcccccatggggtaaaggaagcggtatctttgacgaatcaacccccgtgcagactcgacagcacctgaacccacctggagggaagaccagcgacatttttgggtctccggtcactgccacttcacgcttggcacacccaaacaaacccaaggatcatgttttcttatgtgaaggagaagaaccaaaatcggatcttaaagctgc

SEQ ID NO: 11563 - DNA, 421 bp, Homo sapiens; identical to SEQ ID NO: 430

SEQ ID NO: 11564 - DNA, 521 bp, Homo sapiens; identical to SEQ ID NO: 3143

SEQ ID NO: 11565 - DNA, 558 bp, Homo sapiens; identical to SEQ ID NO: 3144

SEQ ID NO: 11566 - DNA, 528 bp, Homo sapiens; identical to SEQ ID NO: 3145

SEQ ID NO: 11567 - DNA, 587 bp, Homo sapiens; identical to SEQ ID NO: 3146

SEQ ID NO: 11568 - DNA, 393 bp, Homo sapiens; identical to SEQ ID NO: 432

SEQ ID NO: 11569 - DNA, 674 bp, Homo sapiens; identical to SEQ ID NO: 3148

SEQ ID NO: 11570 - DNA, 566 bp, Homo sapiens; identical to SEQ ID NO: 3149

SEQ ID NO: 11571 - DNA, 530 bp, Homo sapiens
  misc_feature 339: n = A,T,C or G
ttccgttgctgtcgctccgacaatgtggatcacattgattcccttattggctttcctgagcagattgctgaaaagctgttctctgctgctgaagccagacagaaattcactgagccaggtgcagggctgagggctttacagaaattcactgaggcctatggaagtttggtgctttgctccctgtgtttgcgaaacaggtatctcgtgatttcagaaaagcttgaggagattaagtctttccgggagctgacctgcctggatctttcctgttgcaagcttggagatgagcatgaacttctagaacatctcaccaatgaagccctgtctagtgtaactcanctccacctgaaggataattgtttatctgatgctggggtgcggaagatgacagcaccagttcgagtgatgaaaagaggccttgagaatctaacattattagacttatcatgtaaccctgagatcacagatgcaggcattggatacctcttttcttttaggaaactaaactgcttagatatctctgggacagg

SEQ ID NO: 11572 - DNA, 198 bp, Homo sapiens
aaatgaaatttatgttattatcctgctcgaagtaccattatggtttccatatggtagttacattggaaagtcctgcagtaagaatctagttctctcttttctttaagcttatggttgaaggttaaccttgtttgggcagattaccaaattactgctgatgtagtatgataaagtcagcttcttggatacagacacacc

SEQ ID NO: 11573 - DNA, 285 bp, Homo sapiens
cctgctggagtacattgcgcccatgacggagaagctctaccccggctactacaccagggcccagtttgacctggcctttgtcgtccgctacaagcctgatgagcagccctcactgatgccacaccatgatgcctccaccttcaccatcaacatcgccctgaaccgagtcggggtggattaccagggcgggggctgtcggttcctgcgctacaactgttccatccgagccccaaggaaggggtggaccctcatgcaccctggacgactcacgcattaccatgaggg

SEQ ID NO: 11574 - DNA, 359 bp, Homo sapiens
tccgttgctgtcgggccaactgcagcgtccacacagctccaccagctgaggccagcatggggacccgtgtccactgccaccaacagggccacgtcctcacaggctgcagctcccactgggaggtggaggaccttggcacccacaagccgcctgtgctgaggccacgaggtcagcccaaccagtgcgtgggccacagggaggccagcatccacgcttcctgctgccatgccccaggtctggaatgcaaagtcaaggagcatggaatcccggcccctcaggagcaggtgaccgtggcctgcgaggagggctggaccctgactggctgcagtgccctccctgggacctcccacgtcctgggg

SEQ ID NO: 11575 - DNA, 368 bp, Homo sapiens
caaaaccacaagcacgcaagtattaaataagagcaagctgtcctgagcccatacctaatgaatttgtgtcttaaatattgtacattgtgttagaggcttgtcaaaactgggattatggcaagaaaggttgcctaactcatacctttctgcctcaaattccaggtgctaaaggctaatggcattttaaacatcttacatttttaaaaatttatattgcctctgccaaacaggcctaatatttaaaagcaagttgagacaaaccaggcagattcattgtgtggaacacgaaggatgtgctttaaaaaaaggtggaatccctcaaaaaattctatatggagacagcagccttaatctacataattcttcat

SEQ ID NO: 11576 - DNA, 547 bp, Homo sapiens; identical to SEQ ID NO: 3154

SEQ ID NO: 11577 - DNA, 550 bp, Homo sapiens
atgaaggagaaataaattccatcagtttttgcttatctaggaaagactttatttctccttcatttcatcaggactagagctgaagatgaaggagacttagacacaaactcttggcctgctccaaataaagctattcctggaaagagaagtgcggttgtaatgggaagaggaagacggcgagatgacatagctcgagcttttgtgggctttgaatatgaagactctcgaggtcggagattcatgtgctctgggcctgacaaagtaatgaaagtaatgggaagtgggccaaaggaatcagctttaaaagccctaaatagtgacatgcccttatatattctgtcatcctctcaaggtagagggctgaaacctcattatgctcaacttatgaggctttttgttgtggttcctgatgctcctttgcagataatactaatgcctcaggttcagccaggcccaccaccatgtccggtattctacccagaaaaacaagaaatcacccttccacctgatggcctttgggttttgagatttccttatgcatatgtgactg

SEQ ID NO: 11578 - DNA, 506 bp, Homo sapiens
ccgttgctgtcggtcagttaaaggccactgatatttttctaagttagcaaggctcacttgcttgctttcttgcctcccttgcctccatccctctcccttcctaccttctctatttacctatttctctccctccctctcttctcctctctttttttttccccgcatatgcagctttttgattgtacttgattttatagagactgcacagttccagcaagattgggagtcaggcatggagcaggcatctcaggctaccagaaagaattggtcacctagactttcagtcaggcatcctcgtttgcattgtcctgtaagtcaattagttgataaatagttcccccttcatcccttaagttttgtttttgtttttgtttttaatataggtaagtgggactctacctaaaattttgcatcatacttatgggtaatatctttttcatatattatttatcaaagtatgaagttgagtattttgcttgtaccatttcaattctgcattatagtag

SEQ ID NO: 11579 - DNA, 574 bp, Homo sapiens
cccttcacccagagccagtgtggtcagtattccaaactctccagccactctcttctacgctgcctcaacactgaaggttgacacaggaaagtcgtactgttcatacacacagtttgagactccaagccaagagtgccacatccctatcctgtggccttttggaaatccaaattgcctgaacatggcggggctttcctgcacattctcctgatttgagattcacgggcacacctttcttttcttttcctcttgtgcctagttaagtgggaatgtgtttggagataggggaaatcacataactggtacaagtatggggtaattgcttaaacatgcctggtggaagtctgatagcgtctctgcacgtgacctctgacaaagcccatcccaggagacggggtgaagctattccccacactctcctgtgaacactggagtcttgcaagacccagggagaacccactgcttttcccaggaggctccaggattaggaaatgtgtgtatttagtgaaaaataggtttgtagtgaaatagttactatttcatgaaagtagatatttttagaatttttgaaata

SEQ ID NO: 11580 - DNA, 366 bp, Homo sapiens
agagctcaccacctacctctttggccaggacccttgaccagccaggcctgaaggaagacctgcggatggacaggagcgggcaggcccgcacatatccacttgctggagcccatgtttacagacagggacatacaccatgcagatcctgagttcctgctgtatgagcagggatatccatgcttatgtatccaaacacagagacccatgggaacaaatgagacacatatagatactgagacctgtgtgtacagtaggaccatgcactcacacccatctggagagggagcccccggtataccaagggagccagttgtgttcagacacacacatcacagcttgactcactaactgaggcctttccatagc

SEQ ID NO: 11581 - DNA, 395 bp, Homo sapiens
  misc_feature 381: n = A,T,C or G
atgtttctggtgtcagggtctgagaagttgctgccaccaactctttaagaaggcgacaggatcagtccttctctcgggttctggcccccaaggtcagagcaagcatcttcctgacagcattttgtcatctaaagtccagtgacatggttccccgtggtggcccgtggcagcccgtggcatggcgtggctcagctgtctgttgaagttgttgcaaggaaaagaggaaacatctcgggcctagttcaaacctttgcctcaaagccatcccccaccagactgcttagcgtctgagatccgcgtgaaaagtcctctgccacgagagcagggagttggggccacgcagaaatggcctcaaggggactctgctccacgtggggccangcgtgtgactgacc

SEQ ID NO: 11582 - DNA, 309 bp, Homo sapiens
tggacgctgatcagccggagcccatgcgcagcggggcgcgcgagctcgcgctcttcctgacccccgagcctggggccgaggcgaaggaggtggaggagaccatcgagggcatgctcctcaggctggaagagttttgcagcctggctgacctgatcaggagtgatacttcacagatcctggaggaaaacatcccagtccttaaggccaaactgacagaaatgcgtggcatctatgccaaagtggaccggctagaggccttcgtcaagatggttggacaccacgtcgccttcctggaagcagacgtgcttc

SEQ ID NO: 11583 - DNA, 526 bp, Homo sapiens
ggcacgagggagggcggacggaccgactgacggtagggacgggaggcgagcaagatggcgcagacgcagggcacccggaggaaagtctgttactactacgacggggatgttggaaattactattatggacaaggccacccaatgaagcctcaccgaatccgcatgactcataatttgctgctcaactatggtctctaccgaaaaatggaaatctatcgccctcacaaagccaatgctgaggagatgaccaagtaccacagcgatgactacattaaattcttgcgctccatccgtccagataacatgtcggagtacagcaagcagatgcagagattcaacgttggtgaggactgtccagtattcgatggcctgtttgagttctgtcagttgtctactggtggttctgtggcaagtgctgtgaaacttaataagcagcagacggacatcgctgtgaattgcgctgggggcctgcaccatgcaaagaagtccgaggcatctggcttctgttacgtcaatgatatcgtct

SEQ ID NO: 11584 - DNA, 449 bp, Homo sapiens
ggcacgagggaagaagcgcgaagagccgttagtcatgccggtgtggtggcggcggcggagactgcgggcccgtagctgggctctgcgaggtgcaagaaagcctttgaggtgaaggtgtatgaaagtcatcataacagatgttttccaaaaacttgtagaaggttgtgaaaaaactactacgatcacgcggcatgtattgagcatataggttgctgtagatgaatgttcttagctgtcatgtttaaaaatacttctgcttcgttacctcaagtgtggcatgcagcattttggaaggaaaattgaagacgtgttcaagaaaacatgaacagaagcaaatgatgaaaatgagcattttacttgatgttgataacatcacaataaattatggagaaaaatacatatttggctaacttttaattgctgaacaataaagtgttttcttttaaatc

SEQ ID NO: 11585 - DNA, 245 bp, Homo sapiens
aggtagggcaatgggctctgcaggccacctgactggggttggtgggggtcctctctcctgccccagctttcactcagccaccacagttgccacaccatggggtggagacgtgggtcaccactggcttgggagcaagcgccttctgcagcacacgaagccgaagctggggtcaggtgaggtcgctacccctggaggtctggcataagggccccaccctcaggtctcctacactggccccattttac

SEQ ID NO: 11586 - DNA, 261 bp, Homo sapiens
cctttaataagttttaataagttttccaaaagtttcaaaattaccaaattgtggggaaaaaataaatctgccttttaaacccaaattttaaatttttccattaaatggtttaaatccaacttcgggcaaatgccacctggaaacaccaaccccaaaatttcagaggaaatatttttccaaacaaggaaccccagggggttttttttcctttccacccccaatactggggatcataagggggctggccagttttccaaattt

SEQ ID NO: 11587 - DNA, 545 bp, Homo sapiens
tggttgcccagggaggcggcagggcgctgatcccgctggccctggaaggcacggacgtggggcagacaaaggcagcccaggcccttgccaagctcaccatcacctccaacccggagatgaccttccctggcgagcggatctatgaggtggtccggcccctcgtctccctgttgcacctcaactgctcaggcctgcagaacttcgaggcgctcatggccctaacaaacctggctgggatcagcgagaggctccggcagaagatcctgaaggagaaggctgtgcccatgatagaaggctacatgtttgaggagcatgagatgatccgccgggcagccacggagtgcatgtgtaacttggccatgagcaaggaggtgcaggacctcttcgaagcccagggcaatgaccgactgaagctgctggtgctgtacagtggagaggatgatgagctgctacagcgggcagctgccgggggcttggccatgcttacctccatgcggcccacgctctgcagccgcattccccaagtgaccacacactggctggag

SEQ ID NO: 11588 - DNA, 526 bp, Homo sapiens
tgtcctctctctgcaaattcagcttccttccccaggtctctgtgcactctgtcttggatgctctggggagctcatgggtggaggagtctccaccagagggaggctcaggggactggttgggccagggatgaatatttgagggataaaaattgtgtaagagccaaagaattggtagtagggggagaacagagaggagctgggctatgggaaatgatttgaataatggagctgggaatatggctggatatctggtactaaaaaagggtctttaagaacctacttcctaatctcttccccaatccaaaccatagctgtctgtccagtgctctcttcctgcctccagctctgccccaggctcctcctagactctgtccctgggctagggcaggggaggagggagagcagggttgggggagaggctgaggagagtgtgacatgtggggagaggaccagctgggtgcttgggcattgacagaatgatggttgttttgtatcatttgattaataaaaaaaaatgaaaaaagtg

SEQ ID NO: 11589 - DNA, 732 bp, Homo sapiens
  misc_feature 137, 176, 332, 517, 600, 629, 658, 680, 710: n = A,T,C or G
ccgcagtcttcgccaccatgccgccctacaccgtggtctatttcccagttcgaggccgctgcgcggccctgcgcatgctgctggcagatcagggccagagctggaaggaggaggtggtgaccgtggagacgtggcangagggctcactcaaagcctcctgcctatacgggcagctncccaagttccaggacggagacctcaccctgtaccagtccaataccatcctgcgtcacctgggccgcacccttgggctctatgggaaggaccagcaggaggcagccctggtggacatggtgaatgacggcgtggaggacctccgctgcaaatacatntccctcatctacaccaactatgaggcgggcaaggatgactatgtgaaggcactgcccgggcaactgaagccttttgagaccctgctgttccagaaccagggaggcaagaccttcattgtgggagaccagatctccttcgctgactacaacctgctggacttgctgctgatccatgaggtcctagnccctggctgcctggatgcgttccccctgctctcaccatatgtggggcgccttaagtgcccggcccaaagctcaaagggctttnctggccttccctgagtacgttgaaccctncccatcaatggcaaccggggaaacaaacnaagggttgggggggactttganccgggaaggcagaaatttggccttcttttnttcaagaaccaataaaaatttt

SEQ ID NO: 11590 - DNA, 615 bp, Homo sapiens
gctgtcaaaaatgctattgatgatggctgtgtggttccaggtgctggtgccgtggaagtggcaatggcagaagccctgattaaacataagcccagtgtaaagggcagggcacagcttggagtccaagcatttgctgatgcattgctcattattcccaaggttcttgctcagaactctggttttgaccttcaggaaacattagttaaaattcaagcagaacattcagaatcaggtcagcttgtgggtgtggacctgaacacaggtgagccaatggtggcagcagaagtaggcgtatgggataactattgtgtaaagaaacagcttcttcactcctgcactgtgattgccaccaacattctcttggttgatgagatcatgcgagctggaatgtcttctctgaaaggttgaattgaagcttcctctgtatctgaatcttgaagactgcaaagtgatcctgaggattacagctgtggaatttttgtccaagcttcaaataattttgaaagaaattttcccatatgaaaaaaggagagaacactggcatctgttgaaatttggaagttctgaaattatagtatttttaaaaattgcactgaagtgtatacacataaagca

SEQ ID NO: 11591 - DNA, 602 bp, Homo sapiens
ggcacgagctctattcagagcataccagaaattcctgatgacctgaagcaactttataaaactgtgtgggaaatctctcagaaaactgttctcaagatggcagctgagagaggtgctttcattgatcaaagccaatctttgaacatccacattgctgagcctaactatggcaaactcactagtatgcacttctacggctggaagcagggtttgaagactgggatgtattatttaaggacgagaccagcagctaatccaatccagttcactctaaataaggagaagctaaaagataaagaaaaggtatcaaaagaggaagaagagaaggagaggaacacagcagccatggtgtgctctttggagaatagagatgaatgtctgatgtgtggatcctgaggaaagacttggaagagaccagcatgtcttcagtagccaaactacttcttgagcatagataggtatagtgggtttgcttgaggtggtaaggctttgctggaccctgttgcaggcaaaaggagtaattgatttaaagtactgttaatgatgttaatgatttttttttaaactcatatattgggattttcaccaaaataatgcttttg

SEQ ID NO: 11592 - DNA, 489 bp, Homo sapiens
tgctcggtccttccgaggaagctaaggctgcgttggggtgaggccctcacttcatccggcgactagcaccgcgtccggcagcgccagccctacactcgcccgcgccatggcctctgtctccgagctcgcctgcatctactcggccctcattctgcacgacgatgaggtgacagtcacggaggataagatcaatgccctcattaaagcagccggtgtaaatgttgagcctttttggcctggcttgtttgcaaaggccctggccaacgtcaacattgggagcctcatctgcaatgtaggggccggtggacctgctccagcagctggtgctgcaccagcaggaggtcctgccccctccactgctgctgctccagttgaggagaagaaagtggaagcaaagaaagaagaatccgaggagtctgatgatgacatgggctttggtctttttgactaaacctcttttataacatgttcaataaaaagctgaacttt

SEQ ID NO: 11593 - DNA, 569 bp, Homo sapiens; identical to SEQ ID NO: 3165

SEQ ID NO: 11594 - DNA, 767 bp, Homo sapiens
  misc_feature 39, 46, 256, 436, 438, 456, 593, 601, 627, 640, 644, 676,684, 714, 727: n = A,T,C or G
tggtaactcacgtagtgctccacctacacgagggccccnttttttnttatggtggaagcagtcgctatgatgattacagcagctcacgtgacggatatggtggaagtcgagacagttactcaagcagccgaagtgatctctactcaagtggtcgtgatcgggttggcagacaagaaagagggcttcccccttctatggaaagggggtaccctcctccacgtgattcctacagcagttcaagccgcggagcaccaanaggtggtggccgtggaggaagccgatctgatagagggggaggcagaagcagatactagaaacaaacaaaactttggaccaaaatcccagttcaaagaaacaaaaagtggaaactattctatcataactacccaaggactactaaaaggaaaaattgtgttactttttttaaattccctgntnagttcccctccataaatnttatgttcttgtgaggaaaaaagtaaaacatgtttaattttatttgactttcgcattgcttttcaacaagcaaatggtaaatgtgttaagacttgtactagtggtgtaactttccaagtaaaaagtatcccctaaangccacttnctatctgattttttccagcaaatgangcaggcaattctnaaanctttccccaaaacatctagcccatctaaaaanggagagangaatcaattctacctatccaaacaagctancttttaaaagggngggtggggggatgctactcataaaaaattcaagggggctt

SEQ ID NO: 11595 - DNA, 63 bp, Homo sapiens
ctgggcaagtactggcctggcacccgcagccgtctccctttcgtggaccaaggaggtgtttgc

SEQ ID NO: 11596 - DNA, 53 bp, Homo sapiens
actatagggctttttttttttggccaaaaaaattttttatttttaaaccccgg

SEQ ID NO: 11597 - DNA, 357 bp, Homo sapiens
ggcttagcggataacaatttcacacaggataagactagcccccatctcaatcatataccaaatctctccctcactaaacgtaagccttctcctcactctctcaatcttatccatcatagcaggcagttgaggtggattaaaccaaacccagctacgcaaaatcttagcatactcctcaattacccacataggatgaataatagcagttctaccgtacaaccctaacataaccattcttaatttaactatttatattatcctaactactaccgcattcctactactcaacttaaactccagcaccacgaccctactactatctcgcacctgaaacaagctaacatgactaacaccctt

SEQ ID NO: 11598 - DNA, 625 bp, Homo sapiens; identical to SEQ ID NO: 2759

SEQ ID NO: 11599 - DNA, 638 bp, Homo sapiens; identical to SEQ ID NO: 2757
  misc_feature 522, 634, 636: n = A,T,C or G

SEQ ID NO: 11600 - DNA, 544 bp, Homo sapiens; identical to SEQ ID NO: 3167

SEQ ID NO: 11601 - DNA, 506 bp, Homo sapiens; identical to SEQ ID NO: 3169

SEQ ID NO: 11602 - DNA, 111 bp, Homo sapiens
ggacctgacccacactgaatgtagtctttcagtacaagacaaagtttcttaaatcccgaagagaaatataagtgttccacaagtttcacaattctcattcaagtccttact

SEQ ID NO: 11603 - DNA, 490 bp, Homo sapiens
ttgctgtcggtgaagggatgttttttttgtaatgctgcagtaaagttggagtacttagttctcttgttgtccagtatatctaataagtgtttttcatattatttccacgtaagggaaataaggtagtacttttctttttatatttctatgcttaaaattctctttcctagtcaaaaattgcccaaatctgtgtttgctttctgcttgctacatttgtctcccttacttttcttgagctaaagacaggctttttccaccggcatcatcactgctatcatcattaacagcgtaattatacaagcatatttaatgctgagtttaatttaatatgtaatacatatggtaattgtagggtaatacccacaacaactgtagtttcttacttggccaagagaatgcttatttaagtgttagacttccattctggcaaaatcttgccttatcagaagacattggaaagagggattccctttggtgtttggtcttctac

SEQ ID NO: 11604 - DNA, 380 bp, Homo sapiens
cgttgctgtcgggcttgggcagcaacccctgcattcctttttttttaccgggctgacgagaatgatgaggtgaagatcactgtcatctaaaagccggctactgtcagcaaagcctgaagaagtggggctggataccctgcccccaccatatccctaccatcccttctcagtcaaccctttacccttacagtagcaagcatagacccctgtctaacgggggtagacaggtgcagatgaggtgaagatcactgtcatctaaaagctggccactaaattaaaaaaaaattaaaagttatgggattaaaaaaagttatgggataaaaaaggttatgggtaacttatggtataaaagttatgaaaaaaggccaggtgcagtggct

SEQ ID NO: 11605 - DNA, 606 bp, Homo sapiens; identical to SEQ ID NO: 3171

SEQ ID NO: 11606 - DNA, 416 bp, Homo sapiens
cgttgctgtcgtcccttgttggagggaatagagtgggggtgggactctgcaggggtgtccttgtccactcgcacccctcgccgcccaccagggccatgctctgtgacttgggctgatccccaccctttctgggcctacagcaccacaggccgctgtacccccttagagctgcccctctctggcctggccggcagacgtcttcttaactcctctgtcctctatattcagcatgttccttgtcagctgctgggccggccctgccttgcgctagcagagcctctcctggcagcttctcaggtctccctaatggagacaccaggctactaggacactggctggggccaccccctcctgcctaatgcctcaccttacagctggggaaactgaggcctggaatggcccaaagtcaccaaggg

SEQ ID NO: 11607 - DNA, 582 bp, Homo sapiens
aattccgttgctgtcgggctaggcaggcgcggacgctccgtcccgacctcacgcgtgacactgtgagggccagacgccagcccccgcgccgccccctgtgcctttgaggttgggcccgttctcagactccatctccggccgggccgcgcgccccgcgccctcgtgggctggtgtctcgcagctggagctggtgagcaggctgctgcacctgcacttcaaggatgacaagaccaaagaagcagcagtccgcggcgtgcggcaggcccaggcagaagacgcgctccgtgtggacgtggaccagctggagaaggtgcttccgcagctgctcctggacttctagggatctcagccgtggctgaggccacccccagaggagcccctggtccacagaagcaggccttgtgtttccagcggcctctgataagaggcagggaaggacctgaaggatttggagttgattcaaacaagatctctgggagtctccagcctgtgcagaaggggcaggactgcagtgcactgcgggccttggagtgtccagtggggacactggtgtgggaaggggcagcacctggggagtccctg

SEQ ID NO: 11608 - DNA, 444 bp, Homo sapiens
gcattttgtgcacacaaaatgtgcgcacacacacacacacacacacacagacactcctgcacatggcctgttaaagaactacaagggaggtgggacgcgggaaagtgtatggtgtgggtttgcatcgtctcatcattgattcttctcatatttttctctgattagagaaactaaagagaattttgtgagaaaggcttgaaagttaatgagttacttctaccaaagtgattacaagcagaaatcctcagatgctgtagagatgctgacccacacatccttagctcaaggaagcccctcgcattagtcaccttcagccatcagcagcctccaccattaaccccagtgtgctgtataaaaaatactttctacatgtgcccaaatttgaaaagttaggaagcactgatttcaaagcaaatcattcacatttgaactgtcttcagtgta

SEQ ID NO: 11609 - DNA, 528 bp, Homo sapiens; identical to SEQ ID NO: 3175

SEQ ID NO: 11610 - DNA, 672 bp, Homo sapiens
  misc_feature 209, 642, 658, 663: n = A,T,C or G
ggcacgagcccaggcaggtccctttgccggcccctacaggctggggtggcccctcctgtcctcagggatcagactcccagactggttagttctgcatgtttccatcaaattaaaggttattccctggccgcctcctggagaaaaccaaccccaccctgccagctgggggcaatggggcagggattttggcctctcagaacagctcctanaggctgctcatgactgaatgttttcccaaatcacctaaatatcggtttgctttttgttttgggggagaggatttagcctcttacttccctgatggattcaaagttttatctatctccttatctcctgccctgtcttggcacaactctggatagattgcaggtgtggaatttgctggagtttggtgacttcgtcaaattcctttggattctgttccgccaaatcagcagtctcgtcctgtggatgcagtgactggaatttcccatctgcaaagcatctctgtagcccagattttgtggagccttaagacactccctcaatgccaccctgacccacggctggagaaccctgtgcttatgtggtgggcaaggccactgttgatggaaggatggcggggacggggttggtgcttcaaaggatctgtggtgcttggangtctacacccttttangacancgtgtcaag

SEQ ID NO: 11611 - DNA, 674 bp, Homo sapiens
  misc_feature 455, 499, 633: n = A,T,C or G
ggcacgagggaacaagtagttttcaaaattgagctcctccaaggtcattggccaatgctgtgtgcaggcattggtcatctttgtaaactcatggcattatttcctcatatgcattatgatactaagaaattcaaccccaacctgtatgaaaagcacagcccagggccctaattgaggctagcatgaatgcctttgaggggccagggggccataggaggcccatgcaatttaactgaagctcaggtgccacgttggatttttattcttattaggccgcaacctttctgaatgagtttagggcaggggctgctgatccggctgtggattcagggagctctaaaatgaatctctaccgttcctttaaaggtctttctggttcctcccagtgttgtcattgctgaggtcgatctcgtagttgttcagttgtgctctttttgctgtcttgtgagtcttanccagtgatccagctgcccaaggacagggccttcagagggcctancgcccttctggtaccaagcgtgtgctcctggcctgtgtgacagtgtctttcccgaagcagtgaaatgagaaattctgcaagtggccaccccggaagatcagtctgtagctcttgggcctggatttctactatgntagtgaatgtaggaatatactgggctttaatggatgaaaat

SEQ ID NO: 11612 - DNA, 495 bp, Homo sapiens
aattccgttgctgtcggtggaagcggcactcaagatgctgcgccgcgaggcccgcctgcgccgcgagtacctgtaccgcaaggcccgggaggaggcgcagcgctcagcccaggagaggaaggagcggctgcggcgcgcgctggaagaaaaccgcctgattcccactgagttacgccgagaggctctggccttacaggggtccctggagtttgatgatgctggaggtgaaggtgtgaccagccacgtggatgatgaataccgatgggcaggagtcgaggatcccaaggttatgatcactacctcccgagaccccagttcccgcctcaagatgtttgcataggagctgaagctggtgttcccgggcgcccagcgaatgaaccgaggtcgacatgaagtgggggcactggtgcgagcctgcaaagccaacggcgtcaccgatctgctggtcgttcacgagcatcggggcacacctgtggggctcatcgtcagccacct

SEQ ID NO: 11613 - DNA, 544 bp, Homo sapiens
ttagattcctggaaaagtacaaagattcagcccagagggatgacatgatttttgaagattgtggcgatgtgcccagtgaaccgaaagaacgaggagactttaatcatgaacgaggagagcgaaaggtctgcagattcaagcttgaatggctgggaaattgctctggattaaatgatgaaacttatggctacaaagagggcaaaccgtgcattattataaagctcaaccgagttctaggcttcaaacctaagcctcccaagaatgagtccttggagacttacccagtgatgaagtataacccaaatgtccttcccgttcagtgcactggcaagcgagatgaagataaggataaagttggaaatgtggagtattttggactgggcaactcccctggttttcctctgcagtattatccgtactatggcaaactcctgcagcccaaatacctgcagcccctgctggccgtacagttcaccaatcttaccatggacactgaaattcgcatagagtgtaaggcgtacggtgagaacattgggtacagtga

SEQ ID NO: 11614 - DNA, 499 bp, Homo sapiens
aattccgttgctgtcgggtggagccatccctgggcaggctccagggtctgtgccaggcccagggctggtgaaggactcaccactgctgcttcagcagatctctgccatgaggctgcacatctcccagctccagcatgagaacagcatcctcaagggagcccagatgaaggcatccttggcatccctgccccctctgcatgttgcaaagctatcccatgagggccctggcagtgagttaccagctggagcgctgtatcgtaagaccagccagctgctggagacattgaatcaattgagcacacacacgcacgtagtagacatcactcgcaccagccctgctgccaagagcccgtcggcccaacttatggagcaagtggctcagcttaagtccctgagtgacaccgtcgagaagctcaaggatgaggtcctcaaggagacagtatctcagcgccctggagccacagtacccactgactttgccaccttcccttcatcagcc

SEQ ID NO: 11615 - DNA, 349 bp, Homo sapiens
ccgttgctgtcggctctccagttcccagggagtggtactaacagcctaccaccccagcggcaaggaccaggccgtcgggaacagccatgcaaaggcaggggaggaagccacctcgagtcgcagatatggccagtacactatgaaccaggaaagcaccaccatcaaagttatggagaagcctccatttgatcgatcaatttcccaggattctttggatgaactatctatggaagactattggatagaactagaaaacatcaagaaatctagtgaaaacagccaagaagatcaagaggtggttgttgtcaaagagcctgatgagggagaattggaagaagagtggcttaaa

SEQ ID NO: 11616 - DNA, 475 bp, Homo sapiens; identical to SEQ ID NO: 3181

SEQ ID NO: 11617 - DNA, 531 bp, Homo sapiens
tttcaaaaaattgttgcatgtttttgatgcaatttgggaaattgtttacttcacaatgtagtcattcataaaaaaattcatgaaaatactgaacatatgtttgaggatttttcttttcctttttaaatttttttattttttctgagacggagatctgctcttacgcccaggctagagtgaagtggcgcgatcttggcttactgcaacctccaccccccaggttcaagcgattctcctgcctcagcctccggagtagctgggattacaggcgcccgccaccacgtccggctaatttttgtattttcagtagagacggggttttgctatgttggccaggctggtctcaaactcctgacctcaagtgatccacctgcctcggcctcccaaagtgttaggataacaggtgtgagccaccgtgcccggctgaagatttttcttaattgcaataaatattcagcattttttctaatgaaaatgaattttgtttaccagtaaaagtatgcattttaaaagactttcagatttatgctt

SEQ ID NO: 11618 - DNA, 63 bp, Homo sapiens
tgtggagtgaaagctcacaaatttggcttctaaagggaagctgttgacacagaaagcctaggg

SEQ ID NO: 11619 - DNA, 456 bp, Homo sapiens
ctaaaaaaaaaatcacattgtacaaatttagatagaacattatcaatgctcagatttataaaaatgggaacagaaagactaaagctagcgaaggaacgtacatttctgttttgtctttttaaattaggaaggtaaaagtgattttttcttcaggtgcagtgatagtaaatgtctagaagacatccgaagagccagaaataaaaagcacaggagccgcctgcagactctcagagttctgtcttcacccactgaatccgaagtggatgcgtgtggcgctcccgcagggtggcctggccccgtggatccacgccgaacgctcaacgagattcccaaggctggctgtgtacagcctaaaactttgtgctcagagaaaaaccagcatgatgggttcatcaactcctgtttctcaaacaaaatgagttttctgtacacttgttacaaaggtctgtacaaaag

SEQ ID NO: 11620 - DNA, 452 bp, Homo sapiens; identical to SEQ ID NO: 3183

SEQ ID NO: 11621 - DNA, 559 bp, Homo sapiens
ccgttgctgtcggtccgccatattgatggagaatactcctgggtctgaaaaccatgaagacatagagcttctgcagaaactctataaaacaggtcgggagatgcaggagaggatcatggacctgcttgtggtggtggagaacgaagatgtaactgttgagctaattcaggtgaatgaggatttgaataatgctatccttggatatgagaggtttactagaaaccaacaaaggattttggagcaaaataagaaccagaaggaagccaccaatactaccagtgagccttctgccccatctcaagatctcctcgacctaagtcccagtccccggatgcctagggccactctgggagaactcaacaccatgaataatcaactttcaggcttaaatttcagccttccaagttctgatgtaacaaacaacttaaaacccagtcttcatccacagatgaacttgctagccttggagaatacagagatacccccgtttgcccaaaggaccagccaaaacctcacctcaagccacgcatatgataattttctggaacattcaaattca

SEQ ID NO: 11622 - DNA, 518 bp, Homo sapiens; identical to SEQ ID NO: 3187

SEQ ID NO: 11623 - DNA, 539 bp, Homo sapiens; identical to SEQ ID NO: 3188

SEQ ID NO: 11624 - DNA, 348 bp, Homo sapiens
ttccgttgctgtcgtgggggagggggaaatacagggatggtccatgttttcaagagtaggggaatgatgtttaaacacaaaaataaattttttttcatttccagaaacactatttatttatggttttttttttttaattttttcttttggggggtgaaattggcagatgcctgaggtcatagctgtgtcctgggtcactggggctggggaggacctcaaggaccccatcaagtgtacacagcagcagcaaaatcaagggatgaccctcctttggggccccctgtcctcagcacattccaggcagttgtgccctgacccacagggacccgtggggatgggaggaggtcc

SEQ ID NO: 11625 - DNA, 308 bp, Homo sapiens
gaaagaatgaaagaattgagtcaggacagtactgggcgggtgaaacgattaccacccatagtgcgaggaggagccatcgacagatactggcccaccgccgacgggcgcctggttgaatatgacatagatgaagtggtatatgacgaagattcaccttatcaaaatataaaaattctacactcgaacagtttggaaatattctcatccttagtggggatgttaatttggcagagagtgatttggcatatacccgggccatcatgggcagtggcaaagaagattacactggcaaagatgtactcattctg

SEQ ID NO: 11626 - DNA, 407 bp, Homo sapiens
ctcaggtttaacttgcacagagcaaaattttatatcaaaatctggttatcatcagtctgcttcagaacatggtcttgttgtcattgctccagataccagccctcgtggctgcaatattaaaggtgaagatgagagctgggactttggcactggtgctggattttatgttgatgccactgaagatccttggaaaaccaactacagaatgtactcttatgtcacagaggagcttccccaactcataaatgccaattttccagtggatccccaaaggatgtctatttttggccactccatgggaggtcatggagctctgatctgtgctttgaaaaatcctggaaaatacaaatctgtgtcagcatttgctccaatttgcaaccctgtactctgtccctggggcaaaaaag

SEQ ID NO: 11627 - DNA, 467 bp, Homo sapiens
ctgagtcctggtgccagaagctgaaccagcgcaaggagaacctctccaggcgggaacgggagcaccacgcggaggccgcgcagttccaggaagatgtcaacgccgatcccgaggtgcagcgctgctccagctggcgggagtacaaggagctgctgcagcggcggcaggtgcagaggagccagcgccgggcccctcacctgtggggccagcccgtcaccccgctgctgagtcctggccaggccagctccccagccgtggtccttcagcatatctctgtgctgcagacaacacaccttcctgatggaggtgtccggctgttggagaagtctgggggcttggaaatcatctttgatgtttaccaggccgacgctgtggccacattccgaaagaataaccctggcaaaccctatgcccggatgtgcattagtggatttgatgagcctgtcccagacctctgcagcctcaag

SEQ ID NO: 11628 - DNA, 593 bp, Homo sapiens
tttaatcccagcactttgggaggctgaggcagatggatcgcctgaggttgggagttcgagaccagcctggccagcatggtgaaaccctgtctctactaaaaatacaaaaattagccaggtgtggtggcgcacacctgtagtcccagctactcgggaggctgaggcaggagaattggttgaacccaggaggcggaggttgcagtgagcagagatcgtgccactgcactccagcctgggtggacagagcaagactccgtctcaaagaaacaaacaaaaaattaaaagggatagaatataatgaaatatattttgaacttaaattatattctatatgtgtatcttcctaggcaaaagctgtaatttccagagagaccattaggaacagggagtatctatttttctccattatttatttctagaaactcataaaatggattgtatttttctataagaacaaaatattaattaaggtatagatgactgaccaagggcttaatcaaataaaatgactaacagcatctatcataaagccacacaagccttatgttctcatctcaaaaatgctgtgacagctttttggctgctttaaccat

SEQ ID NO: 11629 - DNA, 481 bp, Homo sapiens
accatggcggacggcggctcggagcgggctgacgggcgcatcgtcaagatggaggtggactacagcgccacggtggatcagcgcctacccgagtgtgcgaagctagccaaggaaggaagacttcaagaagtcattgaaacccttctctctctggaaaagcagactcggctgcttccgatatggtatcgacatcccgtatcttacttgcagtagtgaagatgtgctatgaggctaaagaatgggatttacttaatgaaaatattatgcttttgtccaaaaggcggagtcagttaaaacaagctgttgccaaaatggttcaacagtgctgtacttatgttgaggaaatcacagaccttcctatcaaacttcgattaattgatactctacgaatggttaccgaaggcaagatttatgttgaaattgagcgtgcgcgactgactaaaacattagcaactataaaagaacaaaatggtgatgtgaa

SEQ ID NO: 11630 - DNA, 436 bp, Homo sapiens; identical to SEQ ID NO: 3189

SEQ ID NO: 11631 - DNA, 439 bp, Homo sapiens
acatctgttgtcaactgctgtacccagaaatctagaactctgccgacagcctctcctggtgagtcgggactcagctgaggacacatccccaccctgcctcccatctggccctttggacaactggccctttgtgacagggctgactcaagtgttaggcagggtctcaggcctttgattgctcacccctgctccccaggccctgccctcacttttaccaaaggttctccctcggcgggagggcatctgtgttggaggtgatttgtctgggttcttccttttggttccagaaggaactgtcagtcatcagcatctgcgttgttagcagtcagtaccacccccgccccacaatgacagtcaaggctgacttgttgactgaagcctttttcccagaccccttatttcgaatccccaagcttcagtccctcttgggggtggagac

SEQ ID NO: 11632 - DNA, 432 bp, Homo sapiens
gcctggtgctgcctatggctctggagctcatgacggtgctggtgggcagcccccgcaaggatgggctggtgtctctcctcaccacctctgagggtgccgatgagccccagcggctgcagtttccactgcccacagcccagcgctcgctggagcctgggactcctcggtgggccaactatgtcaagggagtgattcagtactacccagctgcccccctccctggcttcagtgcagtggtggtcagctcagtgcccctggggggtggcctgtccagctcagcatccttggaagtggccacgtacaccttcctccagcagctctgtccagactcgggcacaatagctgcccgcgcccaggtgtgtcagcaggccgagcacagcttcgcagggatgccctgtggcatcatggaccacttcatctcacttatgggac

SEQ ID NO: 11633 - DNA, 262 bp, Homo sapiens
ggggtttggagactggcgggcctcggaacagcagagctagcggacttccggtctggccctccgctcacggccgagggcaaggcgggttaggtcacttgctgaggaaagagctcaatatgtcacgtgttcctctcccaatgacgtggacctcagttccctctccagtgaagtgggcacagtgttgcccgaaaaagggtgctctggggcttgcctgagacgggacgcgtggaaatgccctgccgaatatgaatggggcgatggc

SEQ ID NO: 11634 - DNA, 524 bp, Homo sapiens; identical to SEQ ID NO: 3190

SEQ ID NO: 11635 - DNA, 595 bp, Homo sapiens
caactcatggaggggtcttcaaagaccttgcaagaagtactaactatggagtatcggctaagtcaagcttgtatgagaggtcatgactttcatgaaggcgttagagctgttttaattgataaagaccagagtccaaaatggaaaccagctgatctaaaagaagttactgaggaagatttgaataatcactttaagtctttgggaagcagtgatttgaaattttgaggtgacaggcttttaaggtatattttgtagcatgggttggcaatctacagcatgtgggccaaatccagcctgctgcctgtttttatataccctgtaagctaagaatggtttccgcatttttaaatggttgggaaaagaaatcaaagactaataattcatgacgtgaaaattatcagaattcacaaataaagctttattggaactagctatactcatctgtttatatattatctgtggctgctttgaaatgagtagttgcaatagagatggtaaagcctacaaagcctaattatttactgtctggtttttgtcagaaaaaagtttgtcaatccttgttttagaagatggaaaaatgtgaagatctttggag

SEQ ID NO: 11636 - DNA, 423 bp, Homo sapiens
ggcacgaggcgaggctggcttcgccgagtatgtgggccgcctgggcatcagcaaccacacgcacgtggtggtgtatgatggtgaacacctgggcagcttctatgctccccgggtctggtggatgttccgtgtgtttggccaccgcaccgtatcagtgctcaatggtggcttccggaactggctgaaggagggccacccggtgacatccgagccctcacgcccagaaccggccgtcttcaaagccacactggaccgctccctgctcaagacctacgagcaggtgctggagaaccttgaatctaagaggttccagctggtggattcaaggtctcaagggcggttcctgggcaccgagccggagccggatgcagtaggactggactcgggccatatccgtggtgccgtcaacatgcctttcatgga

SEQ ID NO: 11637 - DNA, 532 bp, Homo sapiens
ggcacgaggcccagtcgccgcgggaccggggccgctggggtctggacgggggtcgccatgatccgctttatcctcatccagaaccgggcaggcaagacgcgcctggccaagtggtacatgcagtttgatgatgatgagaaacagaagctgatcgaggaggtgcatgccgtggtcaccgtccgagacgccaaacacaccaactttgtggagttccggaactttaagatcatttaccgccgctatgctggcctctacttctgcatctgtgtggatgtcaatgacaacaacctggcttacctggaggccattcacaacttcgtggaggtcttaaacgaatatttccacaatgtctgtgaactggacctggtgttcaacttctacaaggtttacacggtcgtggacgagatgttcctggctggcgaaatccgagagaccagccagacgaaggtgctgaaacagctgctgatgctacagtccctggagtgagggcaggcgagccccaccccggccccggcccctcctggactcgcct

SEQ ID NO: 11638 - DNA, 459 bp, Homo sapiens; identical to SEQ ID NO: 458

SEQ ID NO: 11639 - DNA, 562 bp, Homo sapiens
caaattaccagtctgcattcactgaatgccttcttgctgccaattaaaactgtaggtgtgcagggtgactgtcgttcctacagttacgtgtgtggaatctccagtaaagatgaacctgactgggaatcacttatttttctggctaggcttatacctcgcatgtgtcacaacgttaacagagttgtttatatatttggcccaccagttaaagaacctcctacagatgttactcccactttcttgacaacaggggtgctcagtactttacgccaagctgattttgaggcccataacattctcagggagtctgggtatgctgggaaaatcagccagatgccggtgattttgacaccattacattttgatcgggacccacttcaaaagcagccttcatgccagagatctgtggttattcgaacctttattactagtgacttcatgactggtatacctgcaacacctggcaatgagatccctgtagaggtggtattaaagatggtcactgagattaagaagattcctggtatttctcgaattatgtatgacttaacatcaaagcccc

SEQ ID NO: 11640 - DNA, 495 bp, Homo sapiens
ggcttagcggataacaatttcacacaggagctagcagaccagagaagggctacatatggactcatgttgggcctactcctgcaataacaattaaggaatcagttgccaaccatttgtagttcacaaattaaaactgggtttccaggcctggtgtggtggctcacgcctgtagccccagctattgcaccactgctctccaagctgggcaatggagtcagattctctttcttaaaaaaccacaaaaaaactggatttccagttctctaatattcttagtaccacaagatatgtcataggtatctttaaatgaaattcttagctggaaaagtgactaaaaattttttctcctgctacctagtaataaacaaatcattgtttattactggtcacttagaaaattaaaagggatagggccaggcacagtggcttatgcctgtaattgcagcacttttagaggccgaggcaggcggatcacctgaggtcgggaagtggatc

SEQ ID NO: 11641 - DNA, 146 bp, Homo sapiens
cgggggaaggccctttgtaaagtaggccttatttctcttgtcctttcgtacagggaggaatttgaagtaaataaaaaccgacctggattactccggtctgaactcaaatcacgtaggactttaatcgttgaacaaacaaaccttta

SEQ ID NO: 11642 - DNA, 248 bp, Homo sapiens
ggcttagcggataacaatttcacacaggatggattggtcctagcctttctattagctcttagtaagattacacatgcaagcatccccgttccagtgagttcaccctctaaatcaccacgatcaaaagggacaagcatcaagcacgcagcaatgcagctcaaaacgcttagcctagccacacccccacgggaaacagcagtgattaacctttagcaataaacgaaagtttaactaagctatactaaccc

SEQ ID NO: 11643 - DNA, 361 bp, Homo sapiens
actatagggcttttttttttattcgagatggagtcttcttgctctgttgcccaggctggagtgcagtggtgccatcttggctcactgcaacctccgcctcctgggctcaagcgattctgcctcagcctcccgagtagctgggattacaggcatgtgctaccattcctggctaatttttgtacttttagtaaagacagggttttgccatgttggccaggctggtctcgaacttccgacctcaagtgatccacccactttggcctcccaaagtgctgggatgacgggtgagccactgcacctggccaagagggctgatagtaaattattgcaagtgaaaaaactaacgatgcaaatgaaaggg

SEQ ID NO: 11644 - DNA, 382 bp, Homo sapiens
ctgtcggtcctaatgtgtcagcagcaaatccccgaggtgtcttcatgatgtgcatcccaccccccaatgtgacaggctccctgcacctgggccatgcactcaccaacgccatccaggactccctgactcgatggcaccgcatgcgtggggagaccaccctgtggaaccctggctgtgaccatgcaggtattgccacccaggtggtggtggagaagaagctatggcgtgagcagggactgagccggcaccagctgggccgcgaggcctttctacaggaagtctggaagtggaaggaggagaaaggtgaccggatttaccaccagttgaagaagcttggcagctccttggactgggatcgagcctgtttcaccatggaccctaa

SEQ ID NO: 11645 - DNA, 300 bp, Homo sapiens
atgacactgaaattccccataagggtgtgattgtatattcagccaagacactgtatctcccttatgccttttattttcctgacatagcatgctgctggatcaatgtgtgtattgttgctactctgcctatgccagaggtggtgactcactcacacatataaataattttagttgaatgtttttataggttgtgtattccttacttgaaaggcttgggaccagaagtgttgcagatttcagatatttttagattttggaatatttgcattatacttaccagttgagcatcccacaaacctg

SEQ ID NO: 11646 - DNA, 435 bp, Homo sapiens
ccgttgctgtcggcgtggttagcgtcggcggcttttggcatggcgactttttctggcccggctgggccaatcctgtcgcttaatccgcaggaagatgtcgagtttcaaaaggaggtggcgcaggttcgcaagcgcataacccagcgaaaaaaacaagaacaacttactcctggagtagtctatgtgcgccacctacctaacctacttgacgaaacccagatcttttcatatttctcccagtttggcactgtgacacggttcaggctgtccagaagtaaaaggactggaaatagcaaaggctatgcatttgtggagtttgagtctgaggatgttgccaaaatagttgctgaaacaatgaacaactacctgtttggtgaaagactcttggagtgtcattttatgccacctgaaaaagtacataaagaactctttaaa

SEQ ID NO: 11647 - DNA, 530 bp, Homo sapiens; identical to SEQ ID NO: 3194

SEQ ID NO: 11648 - DNA, 514 bp, Homo sapiens
ttccgttgctgtcgggaggacggcgagagcacggacagactcatggggaagggccaggtccagctggacccgcaggccctgcaggacagagactggcagcgcaccgtcatcgccatgaatgggatcgaagtaaagctctcggtcaagttcaacagcagggagttcagcttgaagaggatgccgtcccgaaaacagacaggggtcttcggagtcaagattgctgtggtcaccaagagagagaggtccaaggtgccctacatcgtgcgccagtgcgtggaggagatcgagcgccgaggcatggaggaggtgggcatctaccgcgtgtccggtgtggccacggacatccaggcactgaaggcagccttcgacgtcaataacaaggacgtgtcggtgatgatgagcgagatggacgtgaacgccatcgcaggcaccctgaagctgtacttccgtgagctgcccgagcccctcttcactgacgagttctaccccaacttcgcagagggcatcgctcttt

SEQ ID NO: 11649 - DNA, 565 bp, Homo sapiens
aattccgttgctgtcgatcaaggactgtccttggtatgaccgtggcttctgcaagcacggtcccctctgcaggcaccggcacacacggagagtcatctgtgtgaattacctcgtgggattctgcccggaggggccctcgtgtaaattcatgcaccctcgatttgaactgcccatgggaaccaccgagcagcccccactgccgcagcagacacagcctccagcaaagcaaagtaacaatccgccattacaaaggtcgtcctccttgatccagttaacgagtcagaactcttctcccaatcagcagagaaccccgcaggtcatcggggtcatgcagagtcaaaacagcagcgcgggcaaccggggaccccggccactggagcaggtcacctgttacaagtgtggcgagaaaggacactacgccaacagatgcaccaaagggcacttggcctttctcagtggacagtgacagcagctggagccagctccgagcagcccgggggccccgctgttgggagtgtgcatttaactgtttcatgcgcttgttggcgcgactgtggctcgagct

SEQ ID NO: 11650 - DNA, 600 bp, Homo sapiens
cgttgctgtcggcggcccggggcgactgagcggacaaacggaagtgtaggttacgggtctgagacatcaccgccaagctgggcatcggggagatggccgagactgaccccaagaccgtgcaggacctcacctcggtggtgcagacactcctgcagcagatgcaagataaatttcagaccatgtctgaccagatcattgggagaattgatgatatgagtagtcgcattgatgatctggaaaagaatatcgcggacctcatgacacaggctggggtggaagaactggaaagtgaaaacaagatacctgccacgcaaaagagttgaaggttgctaataatttatactggaatctggcatttttccaagccaagagaagatcgaatggctttttgcagctaactactatgtgtagacaggttttatattataaagtatgcattcttatcacctagtatatagttagtttgtagagtgatttccccccagtttcttgaacatggtatcttcacatcttggaccttggtcagttgtgctattcattattaaacactaaaactttggcggttcttgcataacattgtcagatttttagtgtatttct

SEQ ID NO: 11651 - DNA, 146 bp, Homo sapiens
aaaaacccaaaaatttttttttgggggcccggtttttaatttgaaacccccctcctttaggggccccccttaaaattaaaaatttcttaaaaagcccctttaaacccaaaaaaaaggggggaaccgggccccatttggggttttga

SEQ ID NO: 11652 - DNA, 477 bp, Homo sapiens
agcgctgtctagaagacccacacgccctcctccagcagctgaattcctgcagctcaccatccgccgccagagcaggacgaaccgccaatcgcaaggcacctctgagaacttcaggtaggagaaaagcaaactccctccaacctcttacttcgggcttaaggcagagaactcgcctccccagaatctcctgcctacatgatcccccgctattcctctattatctttacctcggacctgcagccttgggtcgaccctgccctaggggtgactgcatgagagcatggaggatggtcaggcgtcaccaacaaccccatcacccagtaacaagaaccttgactctctcagtccctctgcatcaagacacttacccatttcccacctcatgcctgctaacttgaatgaaacaatcgctgggaaagcattaagagaattaaggctgggcactgtggctcatgcctgtaatcccagcactttgtg

SEQ ID NO: 11653 - DNA, 124 bp, Homo sapiens; identical to SEQ ID NO: 462

SEQ ID NO: 11654 - DNA, 360 bp, Homo sapiens
gcccaggaaaggtaccaaaggccaggctttcctttggtttccttcaaacataggtgaaaaaaacactgccattcacaagtcaaggaacccagggccagctggaagtgtggagcacacatgctgtgaagcacacatgctgtggagattgcaatgtgtctgaggtttgtgtagtagtggaagattttaggtatgtagagcaggttgaaaatggattgagactgcatggtggcataaatgagaaattgcctgtagcatctagtctacttgaaggaagtggagacataaggagagacaaaaacaggtttgtgccataaagtattttttcaaagacaccaagatgtggtaaatgaaaattattag

SEQ ID NO: 11655 - DNA, 650 bp, Homo sapiens
ctatatgtgcattttagttaatattgtgtattaaaggataagtcttaatgctcaaagtatgttaaaaatagatgtagtaaatcagtccctttgtgaatgtccttttgttagtttttaggaaggcctgtcctctgggagtgacctttattagtccaccccttggagctagacatcctgtacttagtcacggggatggtggaagagggagaagaggaagggtgaagggaagggctctttgctagtatctccatatctagacgatggttttagatgataaccacaggtctacaagagcgtttttagtaaagtgcctgtgttcattgtggacaaagttattattttgcaacatctaagctttacgaatggggtgacaacttatgataaaaactagagctagtgaattagcctatttgtaaatacctttgttataattgataggatacatcttggacatggaattgttaagccacctctgagcagtgtatgtcaggacttgttcattaggttggcagcagaggggcagaaggaattatacaggtagagatgtatgcagatgtgtccatatatgtccatatttacattttgatagccattgatgtatgcatctcttggctgtactataagaacacattaattcaatggaaatacac

SEQ ID NO: 11656 - DNA, 384 bp, Homo sapiens
cgttgctgtcgggcttatagtgccctccattgtaaatccatagtcatctctttaagcttattgtgtttaagaaagtagctatgtgttaaacagaggtgatggcagcccttccctagcacactggtggaagagaccccttaagaacctgaccccagtgaatgaagctgatgcacagggagcaccaaaggaccttcgttaagtgataattgtcctggcctctcagccatgaccgttatgaggaaatatcccccattcgaacttaacagatgcctcctctccaaagagaattaaaatcgtagcttgtacagatcaagagaatatactgggcagaatgaagtatgtttgtttatttttctttaaaaataaaggattttggaactctgg

SEQ ID NO: 11657 - DNA, 409 bp, Homo sapiens
  misc_feature 384: n = A,T,C or G
cgttgctgtcggaaagttcgacacagcaaactggctgagtctgtggaaaaggccattgaagagaaaaaataccttgctggggcagacccttctactgtggaaatgtgttaccctcctatcattcagagtggtggcaactataatctcaagttcagtgtggtgagtgacaagaatcatatgcactttggggctatcacttgtgccatgggtattcgcttcaagtcttactgctccaaccttgttcgcactttgatggttgatccttctcaagaagttcaagaaaattataactttttgctccagcttcaagaggagctgctgaaggaattaagacatggtgtgaagatatgtgacgtgtataacgctgtcatggacgtggttaanaagcagaagccagaactgctgaaca

SEQ ID NO: 11658 - DNA, 658 bp, Homo sapiens
  misc_feature 55: n = A,T,C or G
ccgagcaggtggatcgtgaggtcaggagatcaagaccatcctggctaacacggtngaaaccccatctctactaaaaatacaaaaaattcgccgggcgtggtggcaggcgcctgtagtcccagctactcaggaggctgaggcaggagaatggcttgaacccgggaggcggagcttgcagtgagccgagatcgcgccactgcactccagcctgggtgacagaccgagactctgtctcaaacaaaaaacaaaaaacaaaacaaaacaaagatcaaatgaatgatagaatttgaaaactacgctctttaattttacaaaatcatggattttcgtggtgatagcaatggatgcgaagaccattaggtgaaaaatggataggaagcttataatgcatggagcagaatgacaggacactaatctatattaacatctctaaatgagatcagccagatgaacttgatgtgatgaaatggatacacacagtggacacctgtgaagttttcttggctcccccaaaactgagaagtacaagttagtctccaaacctaattaccagtttacaggaaacatggggaataaaagaacaaattaacaacacaaagaagcaaacaaccaaatgcacaatttgggaaattctgcagaagtaatggcctagtttttt

SEQ ID NO: 11659 - DNA, 587 bp, Homo sapiens
gtatatacagatttgaaccttgctttttcacataatagatagttgaggtcattccatagcagtacacagaaactcatctttggtcttaaaactgcataggtactttagtcctctttgacaaatgttgggttgtttcagtcttctgctatcacaaataatgctgcaaagaatacatttgttcatatgtcatttcatccttggcaattttgcctctggaaagttcctagaagtcagattcccaggtcaaaggttaaatgcgcatgtaattttgctggatattgttaaatccccctacagagcatgcaccactcagcattcccctcagcgttgtatgagagggaccatttctccatggcctcaccagcagatttggttattgtagctctgggcttttaccaatttcacaggttaaaaatagtatctaagacaggcgtggcggctcatgcctgtaatcccagcactttgagaggccgaggaaggcagatcactggaggtcaggagttcgagatcatcctagccaacatggtgaaatcctgtctctactaaaaacataaaaattagctgggcatggtggcacatgcctgtat

SEQ ID NO: 11660 - DNA, 401 bp, Homo sapiens
ggcacgaggtggagcacgttgtggcggatgctggggctttcctgcggcatgcggctctgcaggacatcgggaagaacatttacaccatccgggaggtggtcactgagattcgggacaaggccacacgcaggcggctcgctgtcctgccctacgagctgcggttcaaggagcccttaccggaatacgtgcggctggtgactgagttttcaaagaaaacaggagactaccccagcctctctgccacggacatccaagtgcttgcactcacataccagttggaagcagagtttgttggggtgtctcacctaaaacaagaaccacagaaggttaaggtgagctcatcgattcagcacccagaaacacctctgcacatttctggtttccatctgccctacaagcct

SEQ ID NO: 11661 - DNA, 395 bp, Homo sapiens
ggcacgagagtcagctcctgctccgaagaagggttccaagaaggctgtgaccaaggcgcagaagaaggatggcaagaagcgcaagcgcagtcgtaaggagagctactccgtgtatgtgtacaaggtgctaaaacaggttcaccccgatactggcatctcatccaaggccatgggcatcatgaattccttcgttaacgacatcttcgaacgcatcgcaggcgaggcttcccgtctggcccactacaacaagcgctcgaccattacctccagggagatccagaccgccgtgcgtctgctgcttcccggagagctggccaagcacgcagtgtccgaaggtaccaaggctgtcaccaagtatacaagctccaagtaaatgtgtgcttaagtgctttaaa

SEQ ID NO: 11662 - DNA, 352 bp, Homo sapiens
gaaccctgccatgatctccctcttgcaaaagcgagggctacagaacaggcattcaggagtcctgtgctccagtcacagccttttctgttcttcagctaggagacaccaaaccctcaggaagatttactatagctaagagaaaactgcagcagaaagggcgcggctacctacttcttaaattccgtttgtggaccctcagactcttagtcccctactcccagatacagcggccctaccgtggctcctggcaagaagcatggatctcggaatccctgacctgctggacgcgtggctggagcccccagaggatatcttctcgacaggatccgtcctggagctgggactccactgg

SEQ ID NO: 11663 - DNA, 121 bp, Homo sapiens
taggcctctaattgaaccacctctctaagttatgtacgtatatataagctgaaattgtgtttgacattctgagggttttctttttctttttcctttttttttttttggggggggcctgggg

SEQ ID NO: 11664 - DNA, 256 bp, Homo sapiens; identical to SEQ ID NO: 463

SEQ ID NO: 11665 - DNA, 511 bp, Homo sapiens; identical to SEQ ID NO: 464

SEQ ID NO: 11666 - DNA, 555 bp, Homo sapiens
ctcccagcagctgcccagctatattcatccagaggcgggtttttgtttctctctcttccctcactgctgctggccccaaccatattcttgattacttatgaaggacaggctttgaaatttgacatctgtatccatcaagcccagcttgagctctgcttcagataatttaagatgtaccaggtggcacttcaggctagaaaactctgtggtctcccagcaacttaaaggaagatcgtatgtccacttaagcagtgtaaaagataactcaagaaagaaaggggcttcatcacctaactcatcaagctttagaatgtatctgcctgcacaaatacaagtagagacggggtttcaccgtgttagccaggatggtctcaaactcctgacctcgtgatccgcctgcctcgcctcccaaagtgctgggattacaggcgtgagccaccgcgccctgccacaagagggtaaggaaactgaaatatgacaaggttaaatgattcagatgaggggccggaaagcacgcctcccgagacccattcctggaagcgggtctttaaagct

SEQ ID NO: 11667 - DNA, 300 bp, Homo sapiens
  misc_feature 86, 109, 135, 208: n = A,T,C or G
tgtctcctgccgacaagaccaacgtcaaggccgcctggggtaaggtcggcgcgcacgctggcgagtatggtgcggaggccctgganaggatgttcctgtccttccccancaccaagacctacttcccgcacttcnacctgagccacggctctgcccaggttaagggccacggcaagaaggtggccgacgcgctgaccaacgccgtggngcacgtggacgacatgcccaacgcgctgtccgccctgagcgacctgcacgcgcacaagcttcgggtggacccggtcaacttcaagctcctaa

SEQ ID NO: 11668 - DNA, 343 bp, Homo sapiens; identical to SEQ ID NO: 3196

SEQ ID NO: 11669 - DNA, 345 bp, Homo sapiens
ctgtaactacagcttggaaactatgcaaatggtctagatcctcagagctcacatgataggatatagttagtgatgacattttgctcttcttgtgggaacacacacttcaaggaggagatagtgactgggagataggaacagtttaagatgcagtgtgagtctggcctgcgtgcggtgaggaggccccgccaagagactggtggacatctgactgtgggatgtgctctcaagtaggacgtcatcaggacagattctgaataggcatcatgagagtgctggtcagaaacggctgccactttttttaatttaattttattttttatttaaaggaaggaacaatagcta

SEQ ID NO: 11670 - DNA, 580 bp, Homo sapiens
caagtcaaagctttcagatctctctggcccagtgatatctttggcagttgtgaagatgaccctgtacagacactgttacatatatatttccatcatcagacgctgggccagacaggaagctttgcagttataggctctaacctggacatgtcagaagccaactacaaactgatggaacttaatctggaaataagagagtctctacgcatggtgcaatcataccaacttctagcacaggccaaaccaatgggaaatatggtgagcactggattctgagacacttcaggcctttaggaaagaaactaaactgaagatgatgaagaatattaaccaagcaccttttatggacccttgcattcactgataactttctggcagcatctactttttagtgtaactaatgtcaaactgtatcatcaaaaacaaagatctgaaagaaaaaaacatctgatattttaacagctgccaatatctcccacaataactgcgtgaagaaggaattttttaattacttaacctacgtgaaaagaaaagggctaaaagtgatgcctacaaatacattactttctggggaaagaaa

SEQ ID NO: 11671 - DNA, 432 bp, Homo sapiens
ccaatttacaaaaacaaaggaagaattagaagctgagaaaagagacttaattagaaccaatgagagactatctcaagaacttgaatacttaacagaggatgttaaacgtctgaatgaaaaacttaaagaaagcaatacaacggggggggaacttcagttaaaattggatgaacttcaagcttctgatgtttctgttaagtatcgagaaaaacgcttggagcaagaaaaggaattgctacatagtcagaatacatggctgaatacagagttgaaaaccaaaactgatgaacttctggctcttggaagagaaaaagggaatgagattctagagcttaaatgtaatcttgaaaataaaaaagaagaggtttctagactggaagaacaaatgaatggcttaaaaacatcaaatgaacatcttcaaaagcatgtgga

SEQ ID NO: 11672 - DNA, 495 bp, Homo sapiens
ccgttgctgtcgattttgctagtatggaaaaatactttatttttataatgataaaacaaggaaagtaaagatttctttttggtgtataccagagttaagggcagtagaaggcctccaactttaagaaggcaaacatggcatcaagttctcagcgaaaaagaatgagccctaagcctgagcttactgaagagcaaaagcaggagatccgggaagcttttgatcttttcgatgcggatggaactggcaccatagatgttaaagaactgaaggtggcaatgagggccctgggctttgaacccaagaaagaagaaattaagaaaatgataagtgaaattgataaggaagggacaggaaaaatgaactttggtgactttttaactgtgatgacccagaaaatgtctgagaaagatactaaagaagaaatcctgaaagctttcaagctctttgatgatgatgaaactgggaagatttcgttcaaaaatctgaaacgcgtgg

SEQ ID NO: 11673 - DNA, 310 bp, Homo sapiens
agtaactacaagtaactgggcagggatggttagctgggaagtatggatttcatttccattactaatgcctgcaattgctgataatagacatgccccaggaatcgctgcaagggaaatggagcaagggtctccttctgtggcccagtctggaatgttagtggtgcaatctcgactcactgcaacctccgcctcccggattcaagagattctcctgcctcagcctcccaagtaactgggattacacgtacgcaccaccatgcccggcaaatttttgtatttttagtagagataaggtttcaacatattggcc

SEQ ID NO: 11674 - DNA, 540 bp, Homo sapiens; identical to SEQ ID NO: 3201

SEQ ID NO: 11675 - DNA, 363 bp, Homo sapiens
  misc_feature 5, 8, 10, 13, 32, 52, 53, 57, 74, 85, 89, 97, 103, 104, 128,131, 146, 155, 158, 182, 183, 214, 222, 229, 231, 253, 257,262, 272, 285, 295, 306, 315, 327, 331, 349, 362: n = A,T,C or G
aaagnatnanccngggccactaggggcggggnccccagggccttttgggctnnctcncactggaaaaggggaangggccacccanggcnacccgcangggggnnaagggggcctccccctggttgacnggnctgttccccaccccngcgggggtngcnggggggccaggtacaggcccccannaggggggggggactggggggcccaaaaatanaggcctgncaggatncnaaacaggaatgccaaaaagggngggncccancattgggggnggaaaaaagcccncccccccaanggcgaatctcnggaaaagcnggtttcccccancccntaaaaaataaaggggggnggattccgaaaant

SEQ ID NO: 11676 - DNA, 625 bp, Homo sapiens
ttccgttgctgtcgccttgagctgggttgattgaggatgtgtgaaaagctcacagagcccgatgcctgctgctatttcacggcaatgagcctttttctttctacactgaagattttcttcttatttaatgtggtttattttgggctcagaaataattgctctgttgaaaataatcctttgtcagaaaagaaggtagctaccacatcattttgaaaggaccatgagcaactataagcaaagccataagaagtggtttgatcgatatattaggggtagctcttgattttgttaacattaagataaggtgactttttccccctgcttttaggattaaaatcaaagatacttctatatttttatcactatagatcatagttattatacaatgtagtgagtcctgcatgggtactcgatgtgtaatgaaacctgaaataataagataataagaaaagcaataattttctaaagctgtgctgtcggtgatacagagatgatactcaaattataataaaactcttcattttgtgaattatagaagctactttttataaagccatatttttttagggaaactaaggagtgacatagaactgatgaatgagcaaaagtaagttttgctggattt

SEQ ID NO: 11677 - DNA, 470 bp, Homo sapiens
gcctgtgcttaagtaagaatcaggccttattggagacattcaagcaaaggttggacaactacttttccagaacagaaaggaaactcatgcatcagaaaaggtgactaataaaggtaccagaagaatatggctgcacaaataccagaatctgatcagataaaacagtttaaggaatttctggggacctacaataaacttacagagacctgctttttggactgtgttaaagacttcacaacaagagaagtaaaacctgaagagaccacctgttcagaacattgcttacagaaatatttaaaaatgacacaaagaatatccatgagatttcaggaatatcatattcagcagaatgaagccctggcagccaaagcaggactccttggccaaccacgatagagaagtcctgatggatgaacttttgatgaaagattgccaacagctgctttattggaaatgaggactcatctgat

SEQ ID NO: 11678 - DNA, 568 bp, Homo sapiens
tccatttaaacatacggttgatgatggtctggatattagaaaggcagcatttgagtgtatgtacacacttctagacagttgtcttgatagacttgatatctttgaatttctaaatcatgttgaagatggtttgaaggaccattatgatattaagatgctgacatttttaatgttggtgagactgtctaccctttgtccaagtgcagtactgcagaggttggaccgacttgttgagccattacgtgcaacatgtacaactaaggtaaaggcaaactcagtaaagcaggagtttgaaaaacaagatgaattaaagcgatctgccatgagagcagtagcagcactgctaaccattccagaagcagagaagagtccactgatgagtgaattccagtcacagatcagttctaaccctgagctggcggctatctttgaaagtatccagaaagattcatcatctactaacttggaatcaatggacactagttagatgtttgttcaccatggggaccattacatatgaccatacaatgcactgaattgacaggttaatcataagacatggaaagag

SEQ ID NO: 11679 - DNA, 404 bp, Homo sapiens; identical to SEQ ID NO: 474

SEQ ID NO: 11680 - DNA, 397 bp, Homo sapiens
tactccagaacacagaagctcttccaaggaccttgactcaagaaggatgaggtcctcttactcttctccatttatccactatatgcttggccatttatcctaaatgtggcgggaacagacttgttatctgtcgatgttgacagtgtcttttttaacctatgtcctgcatagattggatacgtttacaaggggaggtggatggccataaaaccagtgcactttgggaattacttttctaggatttgctaccacttataaatgacattgacattcgtcatctcttttttcttttgctaaaaagaatagctgaatttaattcacctattataaaatactcaaaagtaaattgcattggtggccacttctgaattatagctacatttcattatgacccctt

SEQ ID NO: 11681 - DNA, 401 bp, Homo sapiens
aggtatgtgtgtgtgtgtgaagaaatttatttattgagacggagtctggctctgtcacccaggctggagtgcagtggtgcgatctcggctcattacaagctccgcctcccgggttcacgccattctcctgcctcagcctcctgagtagctgggactacaggcacctgccaacacgcccggctaatttttttttttttttttgtatttttagtagagacggggtttcaccgtgttagccaggatggtctaaatctcctgacctcgtgatccgcccacctaggccttccaaagtgctgggattacaggtgtgagccaccgcgcccggccaaaatttattttaaggaattaattggctcacaaagagtggcagtttgagtctaaaggcagtcagctggaaaacc

SEQ ID NO: 11682 - DNA, 154 bp, Homo sapiens
cgttgctgaccattcctagaagccactgtgcttggtagagtgcatcactcaccacaggtgcctcctgagctgcctgagcctggtgcaaaaggattggcccccattatggtgcttctgagataaatcttgccaagattgacaagcaatgatgaaa

SEQ ID NO: 11683 - DNA, 469 bp, Homo sapiens
gcgtctgggcgggtggtaggtgagtgggtattgcgggctagtatccgagcaaaagatggtggcgcaggccgagttaagagctttaatcctgtgaagacatcttagtgaagagtttagagtgctgagagttgaaagcttgcacgtgggaaacgtgcggccggactgccacatgtactgaggttgagtcgtgacggccacaggctccgagttttggcgtgaggaaccgctgatcggccacgggcgccgaacttgctggcctccggcatgtgcctgagcggcggcggaaaaaccaccttaattggggcggagggttagttttaacagcaaagggcctttactaaaatggcgaacgccttccgtcggcgttgttttaaaatgggaagcctcgaccctgtattgaaactgagctgttcgaaggcggcgttgtgtgcaattccgattaatgaaggggaagggttttgtgtggaaa

SEQ ID NO: 11684 - DNA, 609 bp, Homo sapiens; identical to SEQ ID NO: 3203

SEQ ID NO: 11685 - DNA, 709 bp, Homo sapiens
  misc_feature 28, 44, 55, 562, 582, 674, 699: n = A,T,C or G
ggcacgagagcacaatgagaggctactnaagcagtttggagccnaggccaatgtnatcgggccctggatccagaccaagatggaggagatcgggaggatctccattgagatgcatgggaccctggaggaccagctcagccacctgcggcagtatgagaagagcatcgtcaactacaagccaaagattgatcagctggagggcgaccaccagctcatccaggaggcgctcatcttcgacaacaagcacaccaactacaccatggagcacatccgtgtgggctgggagcagctgctcaccaccatcgccaggaccatcaatgaggtagagaaccagatcctgacccgggatgccaagggcatcagccaggagcagatgaatgagttccgggcctccttcaaccactttgaccgggatcactccggcacactgggtcccgaggagttcaaagcctgcctcatcagcttgggttatgatattggcaacgacccccagggagaagcagaatttgcccgcatcatgagcattgtggaccccaaccgcctgggggtagtgacattccangccttcattgacttcatgtnccgcgagacagcccgacacagatacagcagaccaagtcatggctttcttcaagatcctggcttggggacaagactacattaccatggacgancttgcgccgcgagctgccacccgancaggcttagt

SEQ ID NO: 11686 - DNA, 524 bp, Homo sapiens
acagagggctttaaggaagcagcggagaagtttcgaatggaatctggaatcgaacctagtgtggatctggaaacacttgatgaacgaatcaagatccgggagatgatactgaaaggtcagattcaggaggccatcgccttgatcaacagcctccacccagagctcttggacacaaaccggtatctttacttccatttgcagcaacagcatttgatcgagctgatccgccagcgggagacagaggcggcgctggagtttgcacagactcagctggcggagcagggcgaggagagccgagagtgcctcacagagatggagcgtaccctggcactgctggcctttgacagtcccgaggagtcgcccttcggagacctcctccacaccatgcagaggcagaaggtgtggagtgaagttaaccaagctgtgctagattatgaaaatcgcgagtcaacacccaaactggcaaaattactgaaactactactttgggctcagaacgagctggaccagaagaaagtaaaata

SEQ ID NO: 11687 - DNA, 705 bp, Homo sapiens
  misc_feature 625: n = A,T,C or G
ggcacgagtttagagtcaagatcttttatttcctgattttaaaaatcgtcaccatcatagacctcctggcttctcttgtatctgtgttctaatggctcccagcagtgccttcacacagcccctttattccccttcttgtgcctgcccatgagcctgagtgtgacagatcaattagctttgtccctccaaactgtgggagcaggactagactcttctggcaggcagagagctcctcctcggccagtgttcgagcctggtccaccactcctcagttcttcttgctcttggcttttgtggccttggcatccagcgtgctctgggcatgagtgaggtgcttcacagcatcaagcacaaggactccaggcagcaccagccacagggcattcatgaagacaaagtaaaaccagaagtagagagggtggcccagctctccgtgctggaatccgtcgcggtgctctgtcaggaagtagagcacatccccatagatctggcccacagagaccacaagctgtagaatgaaacggaggggatgctggcggagaaaggcgatcaccacccacaggctgagtggtccccacaggcaagctgtgatggtttccatgcacactgtgaagttgtcacccangatgtatcggctgtctccttggcatactcttttcagagttgagataagaaggcttggcttccaacaggtcttcgtagtaa

SEQ ID NO: 11688 - DNA, 505 bp, Homo sapiens; identical to SEQ ID NO: 3210
  misc_feature 40, 47: n = A,T,C or G

SEQ ID NO: 11689 - DNA, 561 bp, Homo sapiens
  misc_feature 353, 399, 405, 472: n = A,T,C or G
tagattgacaagaaagagcccacctgaatgaccttgaaaatattattccatttcttggaattggcatcctgtattccttgagtggtcccgacccctctacagccatcctgcacttcagactatttgtcggagcacggatctaccacaccattgcatatttgacaccccttccccagccaaatagagctttgagtttttttgttggatatggagttactctttccatggcttacaggttgctgaaaagtaaattgtcctgtaaagaaaatcatacaactcagcatccagttggctttttaagaattctgtacttccaatttataatgaatactttcttagattttaggtaggangggagcagaggaattatgaactggggtaaacccatttgaatattancattgncaatatcctggattcttgttttacatttggattaagaaatttaacatagtaattcttaagtctttgnctggatttttaaagacctttcttataaatttgggatcatgttatgatttggtaacattcacacacacctcacttttgaatctattaaat

SEQ ID NO: 11690 - DNA, 421 bp, Homo sapiens
ctcgcagtttacgcggaagattcagagcccgagtctgatggcgaggctggaatcgaggcggtgggcagcgcggctgacgagaaaggcggattggtatctgatgcctatggggaggatgacttttctcgtctagggggtgatgaagatggttatgaagaagaagaagatgagaacagtcgacagtcggaagatgacgatgcagagactgaagaacctgaggctgatgacccaaatgataatactgaagctgaagagcgagaccccgaggaactcgtggcctccttttctgaaagagttcagaacatgtctcctgatgaaatcaagatcccgtcagaaccccctggcagatgttcaaatcacttgcaagacaagatccagaagctttatgaacgaaagataaaggagggaatggatatgaact

SEQ ID NO: 11691 - DNA, 141 bp, Homo sapiens
cgactttttaaagaagaaagcctttatttccttgtttggcaaataaaacgggctaagtgggtggcttttgggggatgggccaaagagaccaaatcccatatcctggtccgactcctccgacttttcctgggtttaaacctt

SEQ ID NO: 11692 - DNA, 550 bp, Homo sapiens
ggcttagcggataacaatttcacacaggataagactagcccccatctcaatcatataccaaatctctccctcactaaacgtaagccttctcctcactctctcaatcttatccatcatagcaggcagttgaggtggattaaaccaaacccagctacgcaaaatcttagcatactcctcaattacccacataggatgaataatagcagttctaccgtacaaccctaacataaccattcttaatttaactatttatattatcctaactactaccgcattcctactactcaacttaaactccagcaccacgaccctactactatctcgcacctgaaacaagctaacatgactaacacccttaattccatccaccctcctctccctaggaggcctgcccccgctaaccggctttttgcccaaatgggccattatcgaagaattcacaaaaaacaatagcctcatcatccccaccatcatagccaccatcaccctccttaacctctacttctacctacgcctaatctactccacctcaatcacactactccccata

SEQ ID NO: 11693 - DNA, 612 bp, Homo sapiens
  misc_feature 498: n = A,T,C or G
ctcacaatcatggcaagccaacgccacttatccagtgaaccactatcacgaaaaaaactctacctctctatactaatctccctacaaatctccttaattataacattcacagccacagaactaatcatattttatatcttcttcgaaaccacacttatccccaccttggctatcatcacccgatgaggcaaccagccagaacgcctgaacgcaggcacatacttcctattctacaccctagtaggctcccttcccctactcatcgcactaatttacactcacaacaccctaggctcactaaacattctactactcactctcactgcccaagaactatcaaactcctgagccaacaacttaatatgactagcttacacaatagcttttatagtaaagatacctctttacgggactccacttatgactccctaaagcccatgtcgaagcccccatcgctgggtcaatagtacttgccgcagtactcttgaaactagcgcntatggtataatacgcctcacactcattctcaacccctgacaaaaacacatagcctaacccttccttgttctatccctatgaagcataattataacaaagctccatctggcctac

SEQ ID NO: 11694 - DNA, 484 bp, Homo sapiens
ttgctgtcggtggcaggacagttgcattctgtggccttcttagcactggcctttgtgctggcactggcatgctgtgcctcgaatgtcactttcctgcccttcttgagccacctgccacctcgcttcttacggtcattcttcctgggtcaaggcctgagtgccctgctgccctgcgtgctggccctagtgcagggtgtgggccgcctcgagtgcccgccagcccccatcaacggcacccctggccccccgctcgacttccttgagcgttttcccgccagcaccttcttctgggcactgactgcccttctggtcgcttcagctgctgccttccagggtcttctgctgctgttgccgccaccaccatctgtacccacaggggagttaggatcaggcctccaggtgggagccccaggagcagaggaagaggtggaagagtcctcaccactgcaagagccaccaagccaggcagcaggcaccacccctg

SEQ ID NO: 11695 - DNA, 539 bp, Homo sapiens; identical to SEQ ID NO: 3215

SEQ ID NO: 11696 - DNA, 471 bp, Homo sapiens; identical to SEQ ID NO: 3216

SEQ ID NO: 11697 - DNA, 400 bp, Homo sapiens; identical to SEQ ID NO: 3219

SEQ ID NO: 11698 - DNA, 591 bp, Homo sapiens
cgttgctgtcggtacatttttgggggctacgagcagcaggcggactgtttttccaatgacattcacaagctagataccagcaccatgacatggactcttatctgtacaaagggcagccctgcacgctggagggacttccactcagccacaatgctgggaagtcacatgtatgtctttgggggccgtgccgaccgctttgggccattccattccaacaatgagatttactgcaaccgcattcgagtctttgacaccagaactgaggcttggctggactgtcccccgactccagtgctgcctgaggggcgccggagccactcggcctttggctacaatggggagctgtacatctttggtggttataatgcaaggctgaaccggcacttccatgacctctggaagtttaatcctgtgtcctttacctggaaaaagattgaaccgaaggggaaggggccatgtccccgccggcgccagtgctgctgtattgttggtgacaagattgtcctctttgggggtaccagtccatctcctgaggaaggcctgggagatgaatttgaccttatagatcattctgacttacacattttggac

SEQ ID NO: 11699 - DNA, 480 bp, Homo sapiens
tgtgaaaaatgaggtcctctttctagagtacctgacaggttgcttggcatccagaagatgtttagctaaggccttgcccgagatggacagccggattccttatgatgactacccggtggttttcttgcctgcctatgagaatcctccagcatggattcctcctcatgagagggtacaccacccggactacaacaatgagttgacccagtttctgccccgaaccatcacactgaagaagcctcctggagctcagttgggatttaacatccgaggaggaaaggcctcccagctaggcatcttcatctccaaggtgattcctgactctgatgcacatagagcaggactgcaggaaggggaccaagttctagctgtgaatgatgtggatttccaagatattgagcacagcaaggctgttgagatcctgaagacagctcgtgaaatcagcatgcgtgtgcgcttcttttccctacaattatcatc

SEQ ID NO: 11700 - DNA, 461 bp, Homo sapiens
ggcacgagagtctcgagtttttttttttttttttgctgaatccaaagatatataaataaaatatatatattttataaagatcagaatgatataaaggagatacatgtttcttcctttaaaaaataaacggaagttacattgttaatgttcatattatgatgccacttttctaaactgcatctggattgaaaggtgtaaatatcaataacagtgctacttagttatcagtatttaatatctgaggtgagttgggggtatctatattaggggtagggtattacagaagataattggcttgatgtcctagaagttctttgatccagaggtgggtgcagctgaaagtaaacagaatggattgccagttacatgtatgcctgcccagttccctttttatttgcagaagctgtgagttttgttcacaattaggttcctaggagcaaaacctcaaggattgatttatt

SEQ ID NO: 11701 - DNA, 345 bp, Homo sapiens; identical to SEQ ID NO: 489
  misc_feature 309, 315, 340: n = A,T,C or G

SEQ ID NO: 11702 - DNA, 393 bp, Homo sapiens
ggcacgaggggggtgctgcgcagctggcggggccggcggcggaggctgaccccctaggacgcttcacgtgtcccgtgtgcttagaggtgtacgagaagccggtacaggtgccctgcggacacgtcttttgctctgcatgcctgcaggaatgtctgaagccgaagaagcctgtctgtggggtgtgtcgcagcgctctggcacctggcgtccgagccgtggagctcgagcggcagatcgagagcacagagacttcttgccatggctgccgtaagaatttcttcctgtccaagatccggtcccacgtggctacttgttccaaataccagaattacatcatggaaggtgtgaaggccaccattaaggatgcatctcttcagccaaggaatgttccaa

SEQ ID NO: 11703 - DNA, 300 bp, Homo sapiens
gatgcatgcttattgaaaattagaacacagataaattatgaaagtagtaaaaccacagaaacaatttttctatatatatagaaacatgttttaatatactgtcttaactttcttacttgataatctggagtcatctttcagggtaatacttgtatcccattaattttagtggctacacagctttttatagagatgtagtgtactttaatctcctaatgatggatctatagattgcttctattattttctcttacaatgtcgctttatacaaaactgtctatttatgtggacttgttagaa

SEQ ID NO: 11704 - DNA, 1059 bp, Homo sapiens
  misc_feature 2, 4, 5, 6, 7, 8, 18, 19, 20, 21, 22, 23, 24, 25, 26, 27,28, 29, 30, 31, 32, 33, 34, 35, 36, 37, 38, 39, 40, 41,42, 43, 44, 45, 46, 47, 48, 49, 50, 51, 52, 53, 54, 55,56, 57, 58, 59, 60, 61, 62, 63, 64, 65, 66, 67, 68, 69,70, 71: n = A,T,C or G
  misc_feature 72, 73, 74, 75, 76, 77, 78, 79, 80, 81, 82, 83, 84, 85, 86,87, 88, 89, 90, 91, 92, 93, 94, 774, 799, 847, 880, 886,893, 913, 923, 944, 949, 950, 964, 965, 973, 981, 987, 993,1003, 1004, 1011, 1012, 1021, 1028, 1042, 1043, 1045: n = A,T,C or G
  misc_feature 1046, 1047, 1048, 1054, 1055, 1056, 1057, 1059: n = A,T,C or G
gngnnnnnttaactcccnnnnnnnnnnnnnnnnnnnnnnnnnnnnnnnnnnnnnnnnnnnnnnnnnnnnnnnnnnnnnnnnnnnnnnnnnnnnntactttttttttcttttctttctttttttttttttttttaatttttgagatggagttttgctcttgttgcccacgctggagtgcaatggcgcaatcttggctcattgcaacctccacctcccggattcaagcgatccttctgccttagcttcccaagtagctgggattatagacgtgtgccaccattcccagctgatttttgtatttttagtagagatggggtttcaccacgttggccaggctagtctcgaactcccgacctcatgtgatcctcccaccgcagcctcccaaagtgctgggattacaggcgtgagccaccatacccggttgattgtagacttttgattggtatttacaaggacccatgagaggcaacaaagagaagttgtcaagagaacagaccctgagaccaatagtttggctcaagctctggctccctaacttcctaccagtttgaccttgggcaagttacctaacatctttgtgcctccattttctatttgtaaaaggaaactaatagtagtgcctactttataatagagttattacaaatattaaatgagttaatatttgtaaagtaattagaaaaatgcctggcacttcaaaagcagccttcatttattctttggaaataattttaaatgaattcaagggttatatgtagcttttaggcatatatncctaaatggcactgtaaaactgcanaaatatccgatctttaaaaatttttgggtaaatttatcataatatggnaaccaaatcccatttaatggcttttaggggtanccgatnaaaaccngaagtttgcagtttaagccncttatggaangggacccgaaattccaaggancccanngggaaaaaaccccnngaggaatnttggccgntttaanttaaancctttgggtnntttaagnncctaaaaantttttgnccctggattttggnntnnnnaaaaannnntn

SEQ ID NO: 11705 - DNA, 539 bp, Homo sapiens
ttatttatttcaatacttttcagtctctccccatcttttgtgataacacaaatactagatcttttgttatagtccctcaattccccaaggctgtattggcctcctagcatgttaatagatataactcacataaaaaattattgaggtcttcaataattttttttttgagacagggactctctctgttgcccaggctggagtgcagtggcacaatcacggctcactggaggcctaaattgcctgggctcaagtgattccctcatcttagcctcccaagtagctgggaccacagacgtgtgccaccaggctgggttattatttttagatacgaggtctcgttatgttggccagactggtctcaaattcctgggctcaagcaatcctctcgccatgtcctcccaaagttctgggattacaggcgtgagctaccacacctggccagccctcaataatttttaagagtgaaaaaagtctcctgaagccaaaaagtttgaggacctgtgaggtacaaaaaaactaatattaaagaaagttcttac

SEQ ID NO: 11706 - DNA, 542 bp, Homo sapiens; identical to SEQ ID NO: 3222

SEQ ID NO: 11707 - DNA, 486 bp, Homo sapiens
tgcagctccagcagcaatggcagtgacggcgttggcggcgcggacgtggcttggcgtgtggggcgtgaggaccatgcaagcccgaggcttcggctcggatcagtccgagaatgtcgaccggggcgcgggctccatccgggaagccggtggggccttcggaaagagagagcaggctgaagaggaacgatatttccggtgaggctcaccgggtcccaagtccagccctggatctcccaatggccttccaatccttaaactgccaatcgccccacccgttcctacctggtgccttgggcgccccatcccccaacagaactcccgggccccaatccagtataccctaacccttgatgtcccgaccgttgccacgtatagggcactcccagttacctgcacaacagtttcaggcccccaaaccgtttccaccggcgggtctccaaaacaacccacggctcaactcctcctttatcattaccatctcccgcg

SEQ ID NO: 11708 - DNA, 300 bp, Homo sapiens
gagaaagcttaccatcgagggtgtggttgatccttgaagctgcttggtaaagttatcatttcctcagtcttttcttttgtactcctatcatgtattcattaatatctaccagtcccttttcattctaagacaaaacatttctcctaaatctctgaataaaatcagtgctgtaggaagatggactgtgttgatcatgggtgtaagcaacccagtttaagaaacatggcaactaaagggatacctcaggctttctttcccagtgggtcatttttgtcctagttcagtgtgtctgttactatt

SEQ ID NO: 11709 - DNA, 690 bp, Homo sapiens
  misc_feature 588, 644, 663, 668: n = A,T,C or G
ggcacgagcccaaggttgtggtatgctgctttactgtctttcacaagcgccttttatatcctgtcaatcatctgtgtcgggctgctctatacatattacaccaaaccagatggctgcacagaaaacaagttcttcatcagtattaacctgatcctttgcgttgtggcttctattatatcgatccacccaaaaattcaggaacaccagcctcgctccggcctcttgcagtcctccctcatcaccctctacactatgtacctcacctggtcagccatgtccaatgaacctgatcgttcctgcaatcccaacctgatgagctttattacacgcataactgcaccaaccctggctcctggaaattcaactgctgtggtccctacccctactccaccatcaaagagtgggtctttactggattcagataattttattggactgtttgtctttgttctctgcctcttgtattctagcatccgcacttccactaatagccaagtagacaagctgaccctgtcagggagtgacagcgtcatccttggtgatacaactaccagtggtgccagtgatgaaagaagatggacagccttnggcgggctgtggacaacgagaaagaaggaatgcagtatagctactccttattccanctatgctctgcttggcttncttgnacattatgatgaccctgaccag

SEQ ID NO: 11710 - DNA, 502 bp, Homo sapiens
ggcagcatggcgtccgtggcgctgagcgaggcggagaaggtgtacatcgtgcatggcgtccaggaagacctccgtgtggatggccgtggctgtgaggactaccgatgtgtcgaagtggaaactgatgtggtgtccaacactagtgggtccgccagggtcaagctgggtcacacagacatcttggtgggagtgaaagcagaaatggggacgccgaagctggagaaaccaaatgaaggctacttggagttctttgttgactgttcagccagtgctacccctgaatttgaaggtagaggaggtgatgaccttggcaccgagatcgctaacaccctctatcggatatttaacaataaaagcagtgtcgacttaaagaccctctgcattagtcctcgggagcactgctgggttctctatgtggatgtgctgcttctggaatgtggtggaaatttgtttgatgccatttccattgctgtaaaggctgctctcttcatacaaggatacc

SEQ ID NO: 11711 - DNA, 677 bp, Homo sapiens
  misc_feature 613, 639, 667, 673: n = A,T,C or G
ggcacgagggcagccaaggaactgtgacccgatggtggactttttggatagttgggtgcacattattcctgtgtggatcttagataacatactggaccaactcatcttccccaagctgcaaaaggaggtggaaaactggaacccgctcacagacactgttcccatccactcttggatccacccatggctgccccttatgcaggcacggctggagccactctattcccccatccgtagtaagctgtccagcgccctgcagaagtggcaccccagcgactcctctgccaagctcatcctccagccctggaaggatgtcttcactcctggctcctgggaagcattcatggtcaaaaacatagtgcccaagctggggatgtgtcttggtgagctagtcattaacccccaccagcagcacatggatgcattctattgggtgattgactgggaagggatgatctctgtctctagcctggtgggacttcttgaaaagcacttcttccccaagtggcttcaggtgctgtgctcttggctcagtaacagcccaaattatgaggagatcaccaagtggtacctgggttggaagtccatgtctcagaccaagtgctggcacatncatctgtcaaggacaaatttaatgangcactttgatatcatgaaccgggccggngtcctncaat

SEQ ID NO: 11712 - DNA, 111 bp, Homo sapiens
ctctgtcctacttctgactttacttgcggggtgaccatgttcattataatctcaaaggagaaaaaaaaccttgcaaaaaaagctaaaatgacaacacaaaaacaatcttat

SEQ ID NO: 11713 - DNA, 383 bp, Homo sapiens
ccggctgctgcgccccctcctgccagggtggcgattccgctccacagtctcggacggatctgctcagaaaggaagaggcaggcgccagggggaacccccttcgtgttttgtgaccctcccttttaggtgaagcccctttttcttgctaaaaccggcaattctccggttagaaatgttacttggtgttttttggttttgtgaaacggccgtcccaaagctggctggattcctagaagagtctgtgttgaaggcatctttcaagccctcgctctggttctcagggcagcattttccaggcgggtttgttttgcatttcttggagcctctccgagcagcaaccagacgggagatttttattttaagctgttcatgctgggactgac

SEQ ID NO: 11714 - DNA, 300 bp, Homo sapiens
gaagatatatgactcctttgggctacatttcatattgatcaatttctaggtatttttcactggcccaaagtattgcattcccttaacagcaagcacaagttctctatatcacttgttttttgttgttgttgttgttgtcgtcgttgttttgagacggagtcttgctcaggtgccccggagtgcagtggtgcaatctcagctcactgcaacctccacctcctgggttcaagcaattctcctgcttcagcctcccgagtagctgggattacaggtgtgtaccaccacgcctggcaatttttt

SEQ ID NO: 11715 - DNA, 266 bp, Homo sapiens
ttccgttgctgtcggtgaccaccgcgcctggctgagataggttgttttttgaattaactattcttttttttttttttttttttaaaaaaaaaaatttccttttttttcccccgggtggaagcccaggggccaaaaatttagggttattgaaacctttgcccccaaggttaaagggattcccccccccaaatttcccaaaagggggggattaacgggtttgccccatacccccggttttttttttttttttggaaaaaacggggttt

SEQ ID NO: 11716 - DNA, 53 bp, Homo sapiens; identical to SEQ ID NO: 3227

SEQ ID NO: 11717 - DNA, 493 bp, Homo sapiens
gttgctgtcggtcacctccgcctctgctccccgacccggccatgcgcggcctggggctctggctgctgggcgcgatgatgctgcctgcgattgcccccagccggccctgggccctcatggagcagtatgaggtcgtgttgccgcggcgtctgccaggcccccgagtccgccgagctctgccctcccacttgggcctgcacccggagagggtgagctacgtccttggggccacagggcacaacttcaccctccacctgcggaagaacagggacctgctgggttccggctacacagagacctatacggctgccaatggctccgaggtgacggagcagcctcgcgggcaggaccactgcttctaccagggccacgtagaggggtacccggactcagccgccagcctcagcacctgtgccggcctcaggggtttcttccatgtggggtcagacctgcacctgatcgagcccctggatgaaagtggcgagggcggacg

SEQ ID NO: 11718 - DNA, 585 bp, Homo sapiens
agccaggcacgatggccaccttcccaccagcaaccagcgccccccagcagcccccaggcccggaggacgaggactccagcctggatgaatctgacctctatagcctggcccattcctacctcggaggtggaggccggaaaggtcgcaccaagagagaagctgctgccaacaccaaccgccccagccctggcgggcacgagaggaaactggtgaccaagctgcagaattcagagaggaagaagcgaggggcacggcgctgagacagagctggagatgaggccagaccatggacactacacccagcaatagagacgggactgcggaggaaggaggacccaggacaggatccaggccggcttgccacaccccccacccctaggacttattcccgctgactgagtctctgaggggctaccaggaaagcgcctccaaccctagcaaaagtgcaagatggggagtgagaggctgggaatggaggggcagagccaggaagatcccccagaaaagaaagctacagaagaaactggggctcctccagggtggcagcaacaataaatagacacgcacggcagccacagcttgggt

SEQ ID NO: 11719 - DNA, 297 bp, Homo sapiens
ggcacgaggtgacatgctctgagcttgccttctttgacccgtcactcctccacctcctttatttccctgatgaccagaagtttgccatctacatgccactcttcctgcctatggctgtgcccatcctcctgtccctggtcaagatcttcctggagacccgcaagtcctggataaagcctgagaacacagactgagcagggcagcacctccataggaagccttcctttctggccaacgtgggcggtgttatattgtgaggcacgtacatggggcctgccggaatgacttaaatatttg

SEQ ID NO: 11720 - DNA, 400 bp, Homo sapiens; identical to SEQ ID NO: 493

SEQ ID NO: 11721 - DNA, 399 bp, Homo sapiens; identical to SEQ ID NO: 494

SEQ ID NO: 11722 - DNA, 320 bp, Homo sapiens; identical to SEQ ID NO: 3230

SEQ ID NO: 11723 - DNA, 546 bp, Homo sapiens
attccgttgctgtcgattgccttaaaggaaggttttcattttgaggaaacattaactggctttaagtggatgggaaacagagccaaacagctaatagaccaggggaaaactgttttatttgcatttgaagaagctattggatacatgtgctgcccttttgttctggacaaagatggagtcagtgccgctgtcataagtgcagagttggctagcttcctagcaaccaagaatttgtctttgtctcagcaactaaaggccatttatgtggagtatggctaccatattactaaagcttcctattttatctgccatgatcaagaaaccattaagaaattatttgaaaacctcagaaactacgatggaaaaaataattatccaaaagcttgtggcaaatttgaaatttctgccattagggaccttacaactggctatgatgatagccaacctgataaaaaagctgttcttcccactagtaaaagcagccaaatgatcaccttcacctttgctaatggaggcgtggccaccatgcgcaccagtgggacagag

SEQ ID NO: 11724 - DNA, 539 bp, Homo sapiens
attccgttgctgtcgactcagcgtcgctggcagccgctgtacttggaaattcgaaatgagtcccatgactatcctcatagagtggccaagtttccagaaaacagaaatcgaaacagatacagagatgtaagcccatatgatcacagtcgtgttaaactgcaaaatgctgagaatgattatattaatgccagtttagttgacatagaagaggcacaaaggagttacatcttaacacagggtccacttcctaacacatgctgccatttctggcttatggtttggcagcagaagaccaaagcagttgtcatgctgaaccgcattgtggagaaagaatcggttaaatgtgcacagtactggccaacagatgaccaagagatgctgtttaaagaaacaggattcagtgtgaagctcttgtcagaagatgtgaagtcgtattatacagtacatctactacaattagaaaatatcaatagtggtgaaaccagaacaatatctcactttcattatactacctggccagattttggagtccctgaatc

SEQ ID NO: 11725 - DNA, 608 bp, Homo sapiens
ttggcagcatctttacttggcctgggtttgcacccaatttctggacattttatagctgagcattacatgttcttaaagggtcatgaaacttactcatattatgggcctctgaatttacttaccttcaatgtgggttatcataatgaacatcatgatttccccaacattcctggaaaaagtcttccactggtgaggaaaatagcagctgaatactatgacaacctccctcactacaattcctggataaaagtactgtatgattttgtgatggatgatacaataagtccctactcaagaatgaagaggcaccaaaaaggagagatggtgctggagtaaatatcattagtgccaaagggattcttctccaaaactttagatgataaaatggaatttttgcattattaaacttgagaccagtgatgctcagaagctcccctggcacaatttcagagtaagagctcggtgataccaagaagtgaatctggcttttaaacagtcagcctgactctgtactgctcagtttcactcacaggaaacttgtgacttgtgtattatcgtcattgaggatgtttcactcatgtctgtcattttataagcatatcatttaa

SEQ ID NO: 11726 - DNA, 550 bp, Homo sapiens; identical to SEQ ID NO: 495

SEQ ID NO: 11727 - DNA, 457 bp, Homo sapiens
gttgctgtcgctcatgcctgggcaggaccctgagaaaacataggagacatgttccagaaccaggaccgcaaccaggacggcaagatcacagtcgacgagctcaagctgaagtcagatgaggacgaggagcgggtccacgaggagctctgaggggcagggagcctggccaggcctgagacacagaggcccactgcgagggggacagtggcggtgggactgacctgctgacagtcaccctccctctgctgggatgaggtccaggagccaactaaaacaatggcagaggagacatctctggtgttcccaccaccctagatgaaaatccacagcacagacctctaccgtgtttctcttccatccctaaaccacttccttaaaatgtttggatttgcaaagccaatttggggcctgtggagcctggggttggatagggccatggctggtcccccaccatacc

SEQ ID NO: 11728 - DNA, 371 bp, Homo sapiens
tactcacagtgatgaagtaacagacagcatcaactgggcaagtggtgaggatgaccatgtagttgccacagctgaatatgattttgctgccgtatctgaagaagaaatttctttccgggctggtgatatgctgaacttagctctcaaagaacatcaacccaaagtgcgtggttggcttctggctagactcgatggccaaacaacaggacttatacctgcgaattatgtcaaaattcttggcaaaagagaaggtaggaaaacggtggattcaagtaaagtttccaagcatcaacaatcttttaccaacccaacactaactaaaggagccacggctgctgattctttggatgaacaggaagctgcctttgaat

SEQ ID NO: 11729 - DNA, 414 bp, Homo sapiens; identical to SEQ ID NO: 224
  misc_feature 261: n = A,T,C or G

SEQ ID NO: 11730 - DNA, 133 bp, Homo sapiens; identical to SEQ ID NO: 496

SEQ ID NO: 11731 - DNA, 65 bp, Homo sapiens
ttaataaatataagtccaagagctgtcagcctaatctgtaagagcagaacctgtgattgaccaaa

SEQ ID NO: 11732 - DNA, 502 bp, Homo sapiens
gttggttcagctggcgatagcggcgggagcggagccggcggggcctgtgcgaccgcctgggtttgtgaaatggctgctgacatttctgaatccagcggggctgactgcaaaggagacccaaggaacagtgccaagttagatgccgattacccacttcgagtcctttattgtggagtctgttcattaccaacagagtactgtgaatatatgcctgatgttgctaaatgtagacaatggttagagaagaattttccaaatgaatttgcaaaacttactgtagaaaattcacccaaacaagaagctggaattagtgagggtcaaggaacagcaggggaagaagaggagaagaaaaaacagaagagaggtggaaggggtcaaataaaacaaaaaaagaagaccgtaccacaaaaggttactatagccaaaattcccagagcaaagaagaaatatgtgacaagagtatgtggccttgcaacttttgaaattgatcttaaagaagcac

SEQ ID NO: 11733 - DNA, 300 bp, Homo sapiens
ggaagacagcagagcagaggaatctatatagatgtatgcacagacctgtctgtatgctgaactttgttaaaaatatctgccagttattaaaaagcacagtttaaatggggtggggttaaagttcaggtaagtaagttagagagaaaacattgtatgatcagctcctgcacttgatctatctatctttggcttcccaaacagtaactcactccaggccaagtgtgccttagcacgagtgaccacagtttaatagaccacacacatcgtttaacctgctcttggtcattggaaatttacact

SEQ ID NO: 11734 - DNA, 509 bp, Homo sapiens; identical to SEQ ID NO: 3234
  misc_feature 311: n = A,T,C or G

SEQ ID NO: 11735 - DNA, 323 bp, Homo sapiens
ggcacgaacgcatcgaggcaccatgggcgcgtgtggacgaaatgaggggctacgcggagaagctcatcgactatgggaagctgggagacactaacgaacgagccatgcgcatggctgacttctggctcacagagaaggatttgatcccaaagctgtttcaagtactggcccctcggtacaaagatcaaactgggggctacacaagaatgctgcagatcccaaatcggagtttggatcgggccaagatggcagtgatcgagtataaagggaattgcctcccacccctgcctctgcctcgcagagacagccaccttacactccta

SEQ ID NO: 11736 - DNA, 543 bp, Homo sapiens
gcttcaaaccaaggaaagatggaaaatgaagaacagccacaagacgagagaaagccagaagtaacttgtactctggaagacaagaagttagaaaacgagggaaagacagaaaacaagggcaaaacaggagatgaggaaatgttaaaggataaaggaaagccagagagtgagggagaggcaaaagaaggaaagtcagagagggagggagagtcagagatggagggaggatcagagagagagggaaaaccagagatagagggaaagccagagagtgaaggagagccagggagtgaaacaagggctgcaggaaagcgcccagctgaggatgatgtacccaggaaagccaaaagaaaaactaataaggggctggctcattacctcaaggagtataaagaggccatacacgatatgaatttcagcaatgaggacatgataagagaatttgacaatatggctaaggtgcaggatgagaagagaaaaagcaaacagaaattgggggcgtttttgtggatgcaaagaaatttacaggaccccttctaccct

SEQ ID NO: 11737 - DNA, 470 bp, Homo sapiens
ggcagatgtgctcaaggtggaagtcttcagacagacagtggccgaccaggtgcttgtaggaagctactgtgtcttcagcaatcagggagggctggtgcatcccaagacttcaattgaagaccaggatgagctgtcctctcttcttcaagtcccccttgtggcggggactgtgaaccgaggcagtgaggtgattgctgctgggatggtggtgaatgactggtgtgccttctgtggcctggacacaaccagcacagagctgtcagtggtggagagtgtcttcaagctgaatgaagcccagcctagcaccattgccaccagcatgcgggattccctcattgacagcctcacctgagtcaccttccaagttgttccatgggctcctggctctggactgtggccaaccttctccacattccgcccaatctgtaccggatgctggcagggaggtggcagagagctcactgggactg

SEQ ID NO: 11738 - DNA, 362 bp, Homo sapiens
tggaggccaagatgttggcccagaaggctgaggaaaaggagaaccattgtcccacaatgctccggcccctttcacatcgcacagtcacaggggcaaagcccctgaaaaaggctgtggtgatgcccctacagctaattcaggagcaggcagcatccccaaatgccgagatccacatcctgaagaataaaggccggaagagaaagctggagtccctggatgccctagagcctgaggagaaggctgaggactgctgggagctacagatcagcccggagctactggctcatgggcgccaaaaaatactggatctgctgaacgaaggctcagcccgagatctccgcagtcttcagcgcattggcccg

SEQ ID NO: 11739 - DNA, 496 bp, Homo sapiens
attcggcacgagggccgttccacagcgggcgtggaccgtggagcagctgcgcagtgagcagctgcccaagaaggacattatcaagtttctgcaggaacacggttcagattcgtttcttgcagaacataaattattaggaaacattaaaaatgtggccaagacagctaacaaggaccacttggttacagcctataaccatctttttgaaactaagcgttttaagggtactgaaagtataagtaaagtgtctgagcaagtaaaaaatgtgaagcttaatgaagataaacccaaagaaaccaagtctgaagagaccctggatgagggtccaccaaaatatactaaatctgttctgaaaaagggagataaaaccaactttcccaaaaagggagatgttgttcactgctggtatacaggaacactacaagatgggactgtttttgatactaatattcaaacaagtgcaaagaagaagaaaaatgccaagcctttaagtttt

SEQ ID NO: 11740 - DNA, 468 bp, Homo sapiens
cgttggcaagtttgaactcacaggctacctcctgcaccccgaggtgttcctcagattgaagtcacttttgacattgatgccaatggtatactcaatgtctctgctgtggacaagagtacgggaaaagagaacaagattactatcactaatgacaagggccgtttgagcaaggaagacattgaacgtatggtccaggaagctgagaagtacaaagctgaagatgagaagcagagggacaaggtgtcatccaagaattcacttgagtcctatgccttcaacatgaaagcaactgttgaagatgagaaacttcaaggcaagattaacgatgaggacaaacagaagattctggacaagtgtaatgaaattatcaactggcttgataagaatcagactgctgagaaggaagaatttgaacatcaacagaaagagctggagaaagtttgcaaccccatcatcaccaagctgtac

SEQ ID NO: 11741 - DNA, 472 bp, Homo sapiens
gtggttgcagtggctgaaaaaatctttagaaggagcagatcttcctaatctcttgttttacggaccacctggaactggaaaaacatccactattttggcagcagctagagaactctttgggcctgaacttttccgattaagagttcttgagttaaatgcatctgatgaacgtggaatacaagtagttcgagagaaagtgaaaaattttgctcaattaactgtgtcaggaagtcgctcagatgggaagccgtgtccgccttttaagattgtgattctggatgaagcagattctatgacctcagctgctcaggcagctttaagacgtaccatggagaaggagtcgaaaaccacccgattctgtcttatctgtaactatgtcagtcgaataattgaacccctgacctctagatgttcaaaattccgcttcaagcctctgtcagataaaattcaacagcagcgattactagacatt

SEQ ID NO: 11742 - DNA, 576 bp, Homo sapiens
tgtgatggcctcgatcggattgttgagcgctgtgacctgcctgaaatgcatgtgggtgattggatgctctttgaaaacatgggcgcttacactgttgctgctgcctctacgttcaatggcttccagaggccgacgatctactatgtgatgtcagggcctgcgtggcaactcatgcagcaattccagaaccccgacttcccacccgaagtagaggaacaggatgccagcaccctgcctgtgtcttgtgcctgggagagtgggatgaaacgccacagagcagcctgtgcttcggctagtattaatgtgtagatagcactctggtagctgttaactgcaagtttagcttgaattaagggatttggggggaccatgtaacttaattactgctagttttgaaatgtctttgtaagagtagggtcgccatgatgcagccatatggaagactaggatatgggtcacacttatctgtgttcctatggaaactatttgaatatttgttttatatggatttttattcactcttcagacacgctactcaagagtgcccctcagctgctgaacaagcatttgtagctt

SEQ ID NO: 11743 - DNA, 384 bp, Homo sapiens
ggcttagcggataacaatttcacacaggagctagcagaccagagaagggctacatatggactcatgttgggcctactcctgcaataacaattaaggaatcagttgccaaccatttgtagttcacaaattaaaactgggtttccaggcctggtgtggtggctcacgcctgtagccccagctattgcaccactgctctccaagctgggcaatggagtcagattctctttcttaaaaaaccacaaaaaaactggatttccagttctctaatattcttagtaccacaagatatgtcataggtatctttaaatgaaattcttagctggaaaagtgactaaaaattttttctcctgctacctagtaataaacaaatcattgtttattact

SEQ ID NO: 11744 - DNA, 142 bp, Homo sapiens
cacgtctttacgtgggtacttgcgcttactttgtagccttcatcagggtttgctgaaaatggcggtatataggctgagcaaaaggtggtgaggttgatcggggtttatcgattacagaacaggctcctctaaagggatatga

SEQ ID NO: 11745 - DNA, 130 bp, Homo sapiens; identical to SEQ ID NO: 3237

SEQ ID NO: 11746 - DNA, 385 bp, Homo sapiens; identical to SEQ ID NO: 3238

SEQ ID NO: 11747 - DNA, 565 bp, Homo sapiens
cgttgctgtcgctcttgtcggaccagggctaccgggtggacgggcggcgcgccggggagctgcgcaagatccaggcgcggatgggcgtgttcgcgcaggctgacggctcggcctacattgagcagggcaacaccaaggcactggctgtggtctacggcccgcacgagatccggggctcccgggctcgagccctgccggacagggccctagtgaactgtcaatatagttcagcgaccttcagcacaggtgagcgcaagcgacggccacatggggaccgtaagtcctgtgagatgggcctgcagctccgccagactttcgaagcagccatcctcacacagctgcacccacgctcccagattgatatctatgtgcaggtgctacaggcagatggtgggacctatgcagcttgtgtgaatgcagccacgctggcagtgctggatgccgggatacccatgagagactttgtgtgtgcgtgctcagctggcttcgtggacggcacagccctggcggacctcagccatgtggaggaagcagctggtggcccccagctggccctggccctgct

SEQ ID NO: 11748 - DNA, 565 bp, Homo sapiens
ccgttgctgtcgggatcatgtctgcgagccaggattcccgatccagagacaatggccccgatgggatggagcccgaaggcgtcatcgagagtaactggaatgagattgttgacagctttgatgacatgaacctctcggagtcccttctccgtggcatctacgcctatggttttgagaagccctctgccatccagcagcgagccattctaccttgtatcaagggttatgatgtgattgctcaagcccaatctgggactgggaaaacggccacatttgccatatcgattctgcagcagattgaattagatctaaaagccacccaggccttggtcctagcacccactcgagaattggctcagcagatacagaaggtggtcatggcactatgagactacatgggcgcctcctgtcacgcctgtatcgggggcaccaacgtgcgtgctgaggtgcagaaactgcagatggaagctccccacatcatcgtgggtacccctggccgtgtgtttgatatgcttaaccggagatacctgtcccccaaatacatcaagatgtttgtactggatga

SEQ ID NO: 11749 - DNA, 574 bp, Homo sapiens
cgttgctgtcggcaggtttcttgccttgatgtactggagcatcagatcacacggcggcttggagaaacccagggaccatgggcgcctccaggctctataccctggtgctggtcctgcagcctcagcgagttctcctgggcatgaaaaagcgaggcttcggggccggccggtggaatggctttgggggcaaagtgcaagaaggagagaccatcgaggatggggctaggagggagctgcaggaggagagcggtctgacagtggacgccctgcacaaggtgggccagatcgtgtttgagttcgtgggcgagcctgagctcatggacgtgcatgtcttctgcacagacagcatccaggggacccccgtggagagcgacgaaatgcgcccatgctggttccagctggatcagatccccttcaaggacatgtggcccgatgacagctactggtttccactcctgcttcagaagaagaaattccacgggtacttcaagttccagggtcaggacaccatcctggactacacactccgcgaggtggacacggtctagcgggagcccagggcagcccctgggca

SEQ ID NO: 11750 - DNA, 499 bp, Homo sapiens
cgttgctgtcgacgggtcgccgctgcgccgggccgggatggcggccaccgcgctgctggaggccggcctggcgcgggtgctcttctacccgacgctgctctacaccctgttccgcgggaaggtgccgggtcgggcgcaccgggactggtaccaccgcatcgaccccaccgtgctgctgggcgcgctgccgttgcggagcttgacgcgccagctggtacaggacgagaacgtgcgcggggtgatcaccatgaacgaggagtacgagacgaggttcctgtgcaactcttcacaggagtggaagagactaggagtcgagcagctgcggctcagcacagtagacatgactgggatccccaccttggacaacctccagaagggagtccaatttgctctcaagtaccagtcgctgggccagtgtgtttacgtgcattgtaaggctgggcgctccaggagtgccactatggtggcagcatacctgattcaggtgcacaaatggagt

SEQ ID NO: 11751 - DNA, 518 bp, Homo sapiens
ggcacgagatcaatttgtaattttagtattaactctgtaaaagtgtctgtaggtacgttttatattatataaggacagaccaaaaatcaacctatcaaagcttcaaaaactttgggaaagggtgggattaagtacaagcacatttggcttacagtaaatgaactgattattattaactgcttttgcccatataaaatgctgatatttactggaaacctagccagcttcacgattatgactaaagtaccagattataatgccagaatataatgtgcaggcaatcgtggatgtctctgacaaagtgtgtctcaaaaataatatactattacattaaagaaatttaatgtttctctggagttggggctctaggctttcagagtttggttaatcagtgttgattctagatgatcaacataatggaccactcctgaatgagacttaattttgtctttcaaatttactgtcttaaatcagtttattaaatctgaattttaaaacatgctgtttatgacacaatg

SEQ ID NO: 11752 - DNA, 446 bp, Homo sapiens
aacaaaggagggagcttccatccttcttgatggacgaaaaattaaagtgaaaggctatgaaaatggcaactttgttggaccaaccatcatctcgaatgtcaagccaaatatgacctgttacaaagaggagatttttggtccagttcttgtggttctggagacagaaacattggatgaagccatccagattgtaaataacaacccatatggaaatggaactgccatcttcaccaccaatggagccactgctcggaaatatgcccacttggtggatgttggacaggtgggagtgaatgtccccattccagtgcctttgccaatgttctcattcaccggctctcgatcctccttcaggggagacaccaatttctatggcaaacagggcatccaattctacactcagttaaagaccattacttctcagtggaaagaagaagatgctactc

SEQ ID NO: 11753 - DNA, 557 bp, Homo sapiens
ttcaccgtattcaacatctgtcatctcttagtgtctgcagtctgaacctaaccttgaccttttttccctctggtttgagaaaactttggacactatttctacttggccaggtgtgggctcaagagccttactctttccatctcagtttaggggcgcagccagctcctcttcccaatagggctctttctgctttccctctccttggccctagatttgtaatccatgaaaaagcacaaggtcctggctccttgcggtcacattctggttctctgtgttttgtggactctgctctcactgttcacccagcactagcagtaccagatggttctgtggagtcctggggaatggagagagcacagtctgactccctgccaagtagccaggagttgacttgcccatggtccgctggctttcccaccacttcctacaggatgggatctaagagactcaagagctgggtttctttcagcactctgtactgtcccaaatagcaaacaaatcactttgtagccagatttctgaatggaaatgagaaattgaattctccatggactttt

SEQ ID NO: 11754 - DNA, 144 bp, Homo sapiens
cgattcgtgctgaatgagcttatggacagtgcaaaagtgtctaacagcccttcccaggccattgaagtagtagagctggcaagtgccttcagcttacctatttgtgagggcctcacccagagagtaatgagtgattttgcaatc

SEQ ID NO: 11755 - DNA, 300 bp, Homo sapiens
cggcacgagggcggaacaggctaccaagtccgtgctgtttgtgtgtctgggtaacatttgtcgatcacccattgcagaagcagttttcaggaaacttgtaaccgatcaaaacatctcagagaattggagggtagacagcgcggcaacttccggtgggtcattgacagcggtgctgtttctgactggaacgtgggccggtccccagacccaagagctgtgagctgcctaagaaatcatggcattcacacagcccataaagcaagacagattaccaaagaagattttgccacatttgattat

SEQ ID NO: 11756 - DNA, 558 bp, Homo sapiens
atgctgtcaatgtatttgatatccagcaagggtttgataatccccaggtgcggttctttctgggtgacctctgcagccgacaggatctgtacccagctctgaaaggtgtaaacacagttttccactgtgcgtcacccccaccatccagtaacaacaaggagctcttttatagagtgaattacattggcaccaagaatgtcattgaaacttgcaaagaggctggggttcagaaactcattttaaccagcagtgccagtgtcatctttgagggcgtcgatatcaagaatggaactgaagaccttccctatgccatgaaacccattgactactacacagagactaagatcttacaggagagggcagttctgggcgccaacgatcctgagaagaatttcttaaccacagccatccgccctcatggcattttcggcccaagggacccgcagttggtacccatcctcatcgaggcagccaggaacggcaagatgaagttcgtgattggaaatgggaagaacttggtggacttcacctttgtggagaacgtggtccatggacaca

SEQ ID NO: 11757 - DNA, 361 bp, Homo sapiens; identical to SEQ ID NO: 3242

SEQ ID NO: 11758 - DNA, 536 bp, Homo sapiens
tgccagtgatctcagcaccaccagagagcttgttagaaatgcggcatcccaaccccaccacagccctcccaagtcagatactgccacctcacgaggccccccagggatccacaagttcattaaagtttcaggaatccaattctactacaaaatatacatttataattaggaaaaggatagtttcttttaaatggtagaacttccccaatgagtcagctacctgtatttctggcctgtcaggctagacactggagaccattctgcatagaattgtacctccctgaactactgttaggccttagggtggggattcatctttcccttctccccaccatggagacaaaatcctcttaaacatatccgggcctggcatggtggctcacgcctcggcctcccaaagttctgggattacaggcatgagccactgtgcccagccacccgtcacctgctagtgtagacaaatgaataaacttagacaagcacatgggctccctctataccagcctagactttgacactgaaactccatgagtctg

SEQ ID NO: 11759 - DNA, 951 bp, Homo sapiens
  misc_feature 583, 659, 682, 686, 720, 741, 746, 760, 770, 772, 784, 819,821, 824, 834, 842, 843, 848, 850, 856, 861, 869, 872, 879,894, 895, 906, 909, 910, 911, 914, 939: n = A,T,C or G
accctagggcaaatactgagcagggtaaaattcccagaatacccactagaagcgtggaatatatcaatatcctaggaagaagattcagcacaccaaatttcccattactgataacagctctgaaggcataataagaaagtgagtgatcagaagagcagagaaatgacttgttccagtcactgccatcttgtttaccctttcagtggttcccttacccttttccccactgggcatacagctcatctctctctgagtccttttctgctttcctcctttgctctaaacgttcgagtttcaaattcctcttacgaccagacttatctcgaaatacggtttcagcatattgaaattcagctgcaaaggaaaattatactcaaatatcaggatcaaaatcagaaataacattctaagagatcaaatcaaccgcttgggattctaatgctagataagaacttctgcagccagaccaaagtagttcctaccaacatcttggtgcatattggcactgggcccaagaaatggcattttccttttttttttttttgagatggagtctcactctgttgcccaggttggagtgcantgggcgcgattttggctcactgcaacctccacctcccaaggttcaagcgattctcctgtctcaagcctcctgagtnagctggggaatacagggcatacnacancatgcctggctagttttttttttggaattttggntagagacaggggtttcatcanggttngcccaggcctggtncttggaactnanagaccctcaggntggattcaacccaacttccgggctaccaaaaggtngncgngggattacangcatttanncaacngngccctngggcnaaaatggnaanttttcangaagggaaagcagcnntggggatcccnggnnnaantttcaccaaggccttaaaccagggncgtaaatttgtt

SEQ ID NO: 11760 - DNA, 481 bp, Homo sapiens
ggcacgagccgaactctcccctcacgctgatttcggatcgtagagggtcctcatttaccctctgcacttcttaggacattaactccagggaccgcagcggcccacgggccacccgcatagacgggagcggagaggagataagatggcggcccagctgcgcagacaccatgggcggcgaggggcgagctctccccggtgtgtgacagtgggggctattttcgaccatcccattttcgctgatggtttctaaatctctgcatttctgtccctcttagctcgcaaaggatctccttcatccctctccagaagaggagaagaggaaacacaagaagaaacgcctggtgcagagccccaattcctacttcatggatgtgaaatgcccaggatgctataaaatcaccacggtctttagccatgcacaaacggtagttttgtgtgttggctgctccactgtcctctgccagcctacaggaggaaaagc

SEQ ID NO: 11761 - DNA, 383 bp, Homo sapiens
  misc_feature 330, 369: n = A,T,C or G
ggttcttccataaatatagaaataatatatttttcttaaaggatatatttttaattatgtggaagttgtaagcttgaaattttaacttctagtgcttttctaaaattcacaattacaagtttaaaacatttcttctcttccaggtttcatttggaataaagagttggcagttatataaagcacttaataatactatagaaaatagatgtgttttttcttaatatgattttggtattttccacagatcagaagtgtaaacagagagataatgtaacagtatttggaagagataatgacacaaggatatagtgatctgggagcatgaattanaaacggggtactatgtttctggtgtaaaatctaaattgngctttctactagcg

SEQ ID NO: 11762 - DNA, 413 bp, Homo sapiens
  misc_feature 334, 362, 394: n = A,T,C or G
gctggagctgaagccaacctcccgagcaggcatcaaacagaaaggccttttgctaagtagcagcctgatgcactccgagtcagagctggacagcgacgatgccatctttacatggccagaccgagagaagggcaaactcctgcatggtcagaatggctctgtacccaacgggcagacccctctgaaggccaggagcccgcgggaggagatcctgtagccacctggtctgtctcctcagggcagggcccagcacactgcccggccagtcctcctacctccgagtctgcgggcagctgctgtcccagcatctgctgggcatttcgccctgacagtnccaaccagaacccctgggactttgaatncagaaacgttcttcaggaaccccttaacgaanctgtgaatgaaaaaggttc

SEQ ID NO: 11763 - DNA, 395 bp, Homo sapiens
ggcacgagtggtgctgctgctatgagctgcaccatcgagaagatcctgacagacgccaagacgctgctggagaggctacgggagcacgatgcggccgccgagtcgctggtggatcagtcggcggcgctgcaccggcgggtagcagctatgcgggaggcggggacagcgcttccggaccagtatcaagaggatgcatccgatatgaaggacatgtccaaatacaaacctcacattctgctgtcccaagagaacacacagattagagacttgcaacaggaaaacagagagctatggatttccttggaggaacaccaggatgctttggaacttatcatgagcaaatatcggaaacagatgttacagttaatggttgctaaaaaagcggtggatgctga

SEQ ID NO: 11764 - DNA, 552 bp, Homo sapiens
ggcacgagcagataccagctttctgactcctgctctaggattctcaccacgtactggctagacttatacttctcaaatcttaatttcctaaaggccggtcatgcccaacatggtcttcattggaggtatcaactgtaagaagaggaaagacttgtctcaggaatttgaagcctacattaatgcttctggagaacatggaattgtggttttctctttgggatcaatggtctcagaaattccagagaagaaagctatggcaattgctgatgctttgggcaaaatccctcagacagtcctgtggcggtacactggaacccgaccatcgaatcttgcgaacaacacgatacttgttaagtggctaccccaaaacgatctgcttggtcacccgatgacccgtgcctttatcacccatgctggttcccatggtgtttatgaaagcatatgcaatggcgttcccatggtgatgatgcccttgtttggtgatcagatggacaatgcaaagcgcatggagactaagggagctggagtgaccctgaatgttctggaaatgac

SEQ ID NO: 11765 - DNA, 538 bp, Homo sapiens
gccaaaggatgaagctagtgaaggagaaaaagcttaaattccatcttgagctcttggattgtgataatacaatgatttcattaacttttcatttctgtatacctgttcatttggaatttaatgcttgacttctttgttcattttggatctaaacttctcttttcttccttccccattcacatctattagaagactgcatcaccatttctttggcccccttactctgttgtcctttcccttttctttcagtttttttaatcgcatgtctagtatattaagtctccatagccctcctgatgcagtagacagtgctatgctgtggatataataccaaccagaaattggcatttataaacctgttaagagactttaagcatgcttcaagaggcagttgacccactggaatttctataaggctggtacccttcccagagttacagaatcttaggtgccgtctctagtctgtgagggaggaactcccagcatccccattgcccacaaatggaatcctcactgtatccactaggagattagaaat

SEQ ID NO: 11766 - DNA, 529 bp, Homo sapiens
taacagggtccttaggagaccatcagaaagaggaagggcctggtacaaaggttctccaaaacatcctatcggaaaaactcaattactaccaacaagtaaacctgtagatttgtaattggtaaatgttatacttgtcattaatgtaaataaagtgagtaattggtatgacttgcaggatgatgtacatgttagtttgtagctcaggatgattgttaagcaatagatttgctctattgaaaatgtttcatttttttcactgtacaagcaacttagatttttatttgtacaaattacttctttgtttttcttaatgatggcaatttttaaactttaattttattgtgatctcttaaagcagaggttagactttacctttctgactctgtcgtccaggctggagtgcagtggcgcaatctcactgcaagctccacttcctgggttcatgccattttcctgcctcagcctcccgagtagctgggactacaggtgcccgccaccacgcccagctaattttttgtatttttagtag

SEQ ID NO: 11767 - DNA, 537 bp, Homo sapiens
ttccgttgctgtcggatggcggtgtgcatcgcggtgattgccaaggagaattaccccctctacattcgcagcacccctacggagaacgagctgaagttccactacatggtgcacacatctctggacgtggtggatgagaagatctccgcaatggggaaggccctggtcgaccagagggagctgtacctgggcctgctctaccccacggaggactacaagatacggctacgtcaccaactccaaggtgaagtttgtcatggtggtagattcctccaacacagcccttcgagacaacgaaattcgcagcatgttccggaagctacacaactcctacacagacgtgatgtgcaaccccttctacaacccgggggaccgcatccagtccagggcctttgataacatggtgacgtcgatgatgatacaggtgtgctgagtgagctgtgctgccagccatcgcagaggagcccgcgcacgactgtggtggggccgtcggtctgttctggttgcctcttcctgaatgggacgcctggggctttc

SEQ ID NO: 11768 - DNA, 570 bp, Homo sapiens; identical to SEQ ID NO: 508

SEQ ID NO: 11769 - DNA, 512 bp, Homo sapiens
ttccgttgctgtcggctttgggaaaccgtgctcgccccagcaggtgctgacttcatctcccacctagcagcaccgttctgtgcacaaaacccagacctgttagcagacaggccccgtgaggcaatgggagctgaggccacactcagcacaaggccatctgggctcctccagggtgtgtgctcgccctgcggtagatgggagggaggctcaggtccctggggctagggggagccccttctgctcagctctgggccattctccacagcaaccccaggctgaagcaggttcccaagctcagaggcgcactgtgacccccagctccggcctgtcctccaacaccaagcacagcagcctggggctggcctcccaaatgagccatgagatgatacatccaaagcagacagctccaccctggccgagtccaagctgggagattcaagggacccatgagttggggtctggcagcctcccatccagggcccccatctcatgcccctggctgggacgtggct

SEQ ID NO: 11770 - DNA, 298 bp, Homo sapiens; identical to SEQ ID NO: 332

SEQ ID NO: 11771 - DNA, 519 bp, Homo sapiens
ctttaaaataaaggacttccttgaaaaagctaaggatatctttattgaacctcacctttgtctaaataactcaaaccatgaccgacttcataccttggtaactgaacactgttttccagacatgacttgggacatcaaatataagaccgtccgctggagctttgtggaatctttagagccctctcatgttgttcaagttcgctgttcaagtatgatgaaccagggcaacgtgtacggccagatcaccactctggccatctatgaccggtttggccggttgatgtatggacaggaagatgtacccaaggatgtcctggagtatgttgtattcgaaaagcagttgacaaacccctatggaagctggagaatgcataccaagatcgttcccccatgggcaccccctaagcagcccatccttaagacggtgatgatccctggccctcagctgaaaccagaagaagaatatgaagaggcacaaggagaggcccagaagcctcagctagcctgatgacaaaaatg

SEQ ID NO: 11772 - DNA, 234 bp, Homo sapiens
aaaaaagattatcacaactatcaaacgttattcgaaccaagaacacaccatccatatctcttggaaatgcttctagctccggacattcgacatgaaagaaatgtgattttgcagtgtgttcggtacatcatcaaaaaagacttttttggactggatactaattctgcgaaaagtaaagatgtataggcatctggtgtttcagcatacataactgaagcatgtgaaacagtatca

SEQ ID NO: 11773 - DNA, 161 bp, Homo sapiens
ctggcaagcacggccacgccaaggtccatctggctgggcttgacatctttactgggaagaaatatgaagatatctgcccgtcaactcataatatggatgttcccaacatcaaatagaatgacttccagctgattgccatccaggatgggtacctatcactg

SEQ ID NO: 11774 - DNA, 764 bp, Homo sapiens
  misc_feature 26, 28, 35, 305, 419, 464, 480, 563, 574, 585, 604, 614,630, 644, 647, 692, 696, 699, 724, 729, 762: n = A,T,C or G
tcactactcagcttttggctctgtgntntagtggnttcgggccatcaaaatgggaagatacgaagaaagtttcgcagccgctggctttggctccttcgagctggtcagccagatctctgctgaggacctgctccgaatcggagtcactctggcgggacaccagaagaaaatcttggccagtgtccagcacatgaagtcccaggccaagccgggaaccccgggtgggacaggaggaccggccccgcagtactgacctgcaggaactccccaccccagggacaccgcctccccattttccggggcanagtggggactcacagaggcccccagccctgtgccccgctggattgcactttgagcccgtggggtgaggagttggcaatttggagagacaggatttgggggttctgccataatangaggggaaaatcaccccccaccacctcggggaacttcagaccaanggtgagggcgcctttncctcaagactgggtgtgaccagaggaaaaggaagtgcccaacatcttccaaccttcccaagtgcccccctcaccttgatgggngcgttcccgcngaccaaaaaanagtgtgacttcccttgccngcttccaaantgggggggggcttgtncccagggggcaaanaangggtgttaagggccccatgaccaaaaacaattggggtttggtggncccnaanttggtggttgtcaccaccaaacttnaatanttttttttcccttgtaaatgccccttcccccantg

SEQ ID NO: 11775 - DNA, 491 bp, Homo sapiens
ttccgttgctgtcgggactttctgaagaccttttcccccgatgtcttccggttcttctgcctgcggagcagctaccgctcagccatcgactacagtgacagcgccatgctccaagctcagcagctgctcctggggctgggctctttcctggaggacgcacgtgcctacatgaaggggcagctggcctgcggctccgtcagggaagcgatgctgtgggagaggctctccagcaccaagagggccgtgaaggcggccttggcagatgattttgacacacccagggtggttgatgccatcctgggccttgcacaccacgggaatggacagctcagggcgtccctgaaggaacctgaagggccgagaagtcctgctgtgtttggtgccatcatctcttactttgaacagttttttgaaactgttggaatttctctggcaaatcaacagtacgtttcaggagacggcagcgaggctaccttgcatggtgtggtgga

SEQ ID NO: 11776 - DNA, 391 bp, Homo sapiens
cgttgctgtcgctccttctgatcttcaaacaagagagagaccttgaatacactgactcttccaccctttttttttctgggaaaggagagcaagaggtcccgagtcccctcctagtctttcatcctgaatttgcacagaggaaagcgggtgcccggcatggccatcctgatgttgctggcgggatccccatgcaccttgtccttctccactgatactggcagctcggctcctggacccaagatcccttgagtggaattctgcagtgcaagagcccttcgtgggagctgtcccatgtttccatggtccccagtctcccctccacttggtggggtcaccaactactcaccagaagggggcttaccaagaaagccctaaaaagctgttgacttat

SEQ ID NO: 11777 - DNA, 397 bp, Homo sapiens
  misc_feature 397: n = A,T,C or G
cgttgctgtcgcgacctgcttctgggtcggggtttcgtacgtagcagagcagctccctcgctgcgatctattgaaagtcagccctcgacacaagggtttgccgttgctgtcgctagcagtggaagaagactgaatatctcgtataccagaaacatgactcttaaagatggtaaaaacaatgtagccatagctgtaacgtataaccatgatgggtcttatagcatgcagattgaagataaaactttccaagtccttggtaatctttacagcgagggagactgcacttacctgaaatgttctgttaatggagttgctagtaaagcgaagctgattatcctggaaaacactatttacctattttccaaggaaggaagtattgagattgacattccagtcn

SEQ ID NO: 11778 - DNA, 78 bp, Homo sapiens; identical to SEQ ID NO: 511

SEQ ID NO: 11779 - DNA, 472 bp, Homo sapiens
cgcccatatccagaagggcttcaactacacggtgtttgactattgaaaaggccaaacctattaaatgtggaacatttggtgcaacatctttacagcagagatatttagctactggagattttggtggaaaccttcatatatggaatttagaagctccagagatgccagtatattctgtaaagggccataaagaaattataaatgccatagatggcataggtggactaggaattggagaaggagcacctgaaattgtgactggcagccgagatggaactgtgaaggtgtgggacccaaggcaaaaagatgatcctgttgctaatatggaacctgtacaaggagaaaacaagagagactgttggactgtggcatttggcaatgcttataatcaagaagaacgtgttgtttgtgctgctatgacaatggggatatcaaactatttgatctcagaaatatggcattacggtgggag

SEQ ID NO: 11780 - DNA, 555 bp, Homo sapiens
ttttcctggtttcggaccccagcggccggatggtgaaatcctccctgcagcggatcctcaatagccactgcttcgccagagagaaggaaggggataaacccagcgccaccatccacgccagccgcaccatgccgctcctaagcctgcacagccgcggcggcagcagcagtgagagttccagggtctccctccactgctgtagtaacccgggtccggggcctcggtggtgctcctgatgcccctcacccacccctgaagatcccaggtgggcgagggaatagtcagagggatcacaatctttcagctaacttattctactccgatgatcggctgaatgtaacagaggaactaacgtccaacgacaagacgaggattctcaacgtccagtccaggctcacagacgccaaacgcattaactggcgaacagtgctgagtggcggcagcctctacatcgagatcccgggcggcgcgctgcccgaggggagcaaggacagctttgcagttctcctggagttcgctgaggagcagctgcgagccgaccatgtcttcatttgc

SEQ ID NO: 11781 - DNA, 474 bp, Homo sapiens
tctcctacaagctggtgaagacgggcagcgtggtcctcacagccagcactgatctccgcggctatgtggtggggcaggcactgcagctgcatgccgacgttgagaaccagtcaggcaaggacaccagccctgtggtggccagtctgctgcagaaagtgtcctataaggccaagcgctggatccacgacgtacggaccattgcggaggtggagggtgcgggcgtcaaggcctggcggcgggcgcagtggcacgagcagatcctggtgcctgccttgccccagtcggccctgccgggctgcagcctcatccacatcgactactacttacaggtctctctgaaggcgccggaagctactgtgaccctcccggtcttcattggcaatattgctgtgaaccatgccccagtgagcccccggccaggcctggggctgcctcctggggccccacccctggtggtgccttccgcaccacccc

SEQ ID NO: 11782 - DNA, 720 bp, Homo sapiens
  misc_feature 605, 719: n = A,T,C or G
ggcacgagaagctgtgctgtgctcaccagacactttgatcttggacttctcagcctccagaactatggggttctgctcttgtcacccagactggagtgaagtggcacaatctcggctcactgcaacctccgcctcccgggttcaagcgattcccctgcctcagcctccagagtagctggactgcaggcgcacgccaccactcctggctaatttttgtatttttagtagagacggggtttcaccatgttggccaagatgttcttgatcttctcaccttgtgatccgcccacctcaacctcccaaagtgctgagagactaagacacctttctagacagagaggaggccgatggcagacattctcagataggtttgtagctattgacctggctgcatcaaaggagatgaaatcccttagaaattgacagcttctatgaaatttacaatcaagaaggcataagaacaactgctgcagcttcagaactatgcagaaaataaaatgtcaacagctgggagaaaaaattctaagtgagcaacagagccagtgaaaaatatcaccagtaggagcaggcacctgagacagggaaatggcacccactaagtgcangtctacaggggctgaccttgcagaccatttatggatcccaagttaccaaaacccttatttgattatgaactgcatagtagataccaatacatcagaacattggcttaatggttna

SEQ ID NO: 11783 - DNA, 455 bp, Homo sapiens
cggcaggagaagatggcgaccgtgtgggatgaggcccgagcaagatggaattggggaggaggtgctcaagatgtccacggaggagatcatccagcgcacacggctgctggacagtgagatcaagatcatgaagagtgaagtgttgagagtcacccatgagctccaagccatgaaggacaagataaaagagaacagtgagaaaatcaaagtgaacaagaccctgccgtaccttgtctccaacgtcatcgagctcctggatgttgatcctaatgaccaagaggaggatggtgccaatattgacctggactcccagaggaagggcaagtgtgctgtgatcaaaacctctacacgacagacgtacttccttcctgtgattgggttggtggatgctgaaaagctaaagccaggagacctggtgggtgtgaacaaagactctatctgatcctggagacgct

SEQ ID NO: 11784 - DNA, 455 bp, Homo sapiens; identical to SEQ ID NO: 3262

SEQ ID NO: 11785 - DNA, 715 bp, Homo sapiens
  misc_feature 375, 393, 460, 463, 468, 613, 633, 634, 650, 661, 676: n = A,T,C or G
ggcacgaggaacagtcagtttaactttttaacagatcttatttttttattttgagtgccactattaatgtaaaaaggggggggctctacagcagtcgtgatgaaacttaaatatatattctttgtcctcgagattttaggaagggtgtagggtgagtaggccatttttaatttctgaagtgctaagtgtttttatacagcaaacaaaaagtcaattttgctttccaccactgcgagagaggatgtatacttttcaagagagatgattgcctatttaccgtttgacagagtcccgtagatgagcaatggggaactggttgccagggtctaaatttggattgatttatgcactgttatctgttttgacacagatttncttgtaaaatgtgcctantttaccaaaattaacaaagggggggaaaggaccttagaactttttaaggtaaaatcaaatatagctncancatangagaatcgagaaatttgatagaggtaacttgtttaatgtaaatctaatagtacttgtaattttctttctgcttagaatctaaagatgttgtttagaacctcttgtttaaaaaataaataagactgcttatcataaaaatcacatntcacaccattttgaggcagnnggtcaaacaggtaaancctatgatgtntgtcatttttaaagnggtcggaaatttaaccctctggaatacccttctccattg

SEQ ID NO: 11786 - DNA, 546 bp, Homo sapiens; identical to SEQ ID NO: 3265

SEQ ID NO: 11787 - DNA, 538 bp, Homo sapiens; identical to SEQ ID NO: 515

SEQ ID NO: 11788 - DNA, 492 bp, Homo sapiens
ggcttagcggataacaatttcacacaggatgatgctaccactgtactgtcgcgtgccattgctgagctgggcatctatccagctgtggatcctctagactccacctctcgtatcatggatcccaacattgttggcagtgagcattacgatgttgcccgtggggtgcaaaagatcctgcaggactacaaatccctccaggatatcattgccatcctgggtatggatgaactttctgaggaagacaagttgaccgtgtcccgtgcacggaaaatacagcgtttcttgtctcagccattccaggttgctgaggtcttcacaggtcatatggggaagctggtacccctgaaggagaccatcaaaggattccagcagattttggcaggtgaatatgaccatctcccagaacaggccttctatatggtgggacccattgaagaagctgtggcaaaagctgataagctggctgaagagcattcatcgtgagggggcttt

SEQ ID NO: 11789 - DNA, 89 bp, Homo sapiens
ccactgttcaaggtttattgggggttttagttggtataacacttggatagtgggttgcattgtttgtatgtaaatctttttacattata

SEQ ID NO: 11790 - DNA, 358 bp, Homo sapiens
ggcttagcggataacaatttcacacaggatgatgctaccataatcatcgctatccccaccggcgtcaaagtatttagctgactcgccacactccacggaagcaatatgaaatgatctgctgcagtgctctgagccctaggattcatctttcttttcaccgtaggtggcctgactggcattgtattagcaaactcatcactagacatcgtactacacgacacgtactacgttgtagctcacttccactatgtcctatcaataggagctgtatttgccatcataggaggcttcattcactgatttcccctattctcaggctacaccctagaccaaacctacgccaaaatccatttcacta

SEQ ID NO: 11791 - DNA, 491 bp, Homo sapiens
ggcttagcggataacaatttcacacaggatggattggtcctagcctttctattagctcttagtaagattacacatgcaagcatccccgttccagtgagttcaccctctaaatcaccacgatcaaaagggacaagcatcaagcacgcagcaatgcagctcaaaacgcttagcctagccacacccccacgggaaacagcagtgattaacctttagcaataaacgaaagtttaactaagctatactaaccccagggttggtcaatttcgtgccagccaccgcggtcacacgattaacccaagtcaatagaagccggcgtaaagagtgttttagatcaccccctccccaataaagctaaaactcacctgagttgtaaaaaactccagttgacacaaaatagactacgaaagtggctttaacatatctgaacacacaatagctaagacccaaactgggattagataccccactatgcttagccctaaacctcaaca

SEQ ID NO: 11792 - DNA, 625 bp, Homo sapiens; identical to SEQ ID NO: 2754

SEQ ID NO: 11793 - DNA, 539 bp, Homo sapiens
tcgaaaatcagttatttaacccaatttacttgtgaaagaagttttatctttatggactatgatgacttttgacatcaccatttcttgaagaccttggtattaaatgcatgagaaaccttttgccatctagaaatttctaagtttgtttatgttataagactgtaattaattgatagggaatttgggatctcaatccggggctttttgaaatcagatcattaaatatctcgtcactttggggacttgttatttttaactatgatgtggatatcctgttttaattatgaagtctagaattggtacatatgttgtatgctttgtaaagaatttcacttggtctaatttattgcatatactagcttctgttggaaaatgactgacagctagaaagtttaaggtaatttctaagtatactacctataagtaactgataagaattaggcatcattcagtgatatagcagatgactaatgggtttttcaggccctgcacttctctttcccattttcctgttgcattcagcctcttcaatgcttagt

SEQ ID NO: 11794 - DNA, 364 bp, Homo sapiens
ccgttgctgtcgggcaatctccatggctacgtggctgagggtggagccaatgacatccgaggtgctgtggaggccgctcaccaggctttccctggctgggcgggccagtccccaggagcccgggcagccctgctgtgggccctggcggctgcactggatcgccggaagtctaccctggcctctaggctggagaggcacggagcggagctcaaggctgcggaggcggatgtggagctgatcgcaagacgacttctggcgtggggggcccgggtgcaggcccaaggccacaccctgcaggtagccgggctgataggccctgtgctgcgcctgcgggagccgctgggtgtgctggctgtggtgtgtc

SEQ ID NO: 11795 - DNA, 118 bp, Homo sapiens
cgttgctgtcgggacacttgagcccagagttcaaggctgcaatgagccatgatgacaccacggcactacaaccttggtggcacagtgagaacctgactcttaaaaaaaaaaaaaaagg

SEQ ID NO: 11796 - DNA, 527 bp, Homo sapiens; identical to SEQ ID NO: 3273

SEQ ID NO: 11797 - DNA, 511 bp, Homo sapiens
ctggggagaaggggagctgtgatggaggctcgctctgttgccaggctggagtacagcgatctcggctcactgcaacctctgcctcccgggttcaagtgattctcctgcctcagcctcccaagtagctgggactacaggctctttaagggtcacccagagactctggagaagtttgacaagttcaagcacctgaagtcagaggacgagatgaaggcatctgaggacttaaagaagcatggtgccactgtgctcaccgccctgggtggcatccttaagaagaaggggcatcatgaggcagagattaagcccctggcacagtcgcatgccaccaagcacaagatccccgtgaagtacctggagttcatctcggaatgcatcatccaggttctgcagagcaagcatcccggggactttggtgctgatgcccagggggccatgaacaaggccctggagctgttccggaaggacatggcctccaactacaaggagctgggcttccagggctaggccc

SEQ ID NO: 11798 - DNA, 179 bp, Homo sapiens
tagcactaggtccatctgaatgggtggcccacgacatggttatggtcccctcccctccgatctgattctcaaagatgcaggctagcccctggcactgccctgcctctgttcctgtctcctcaaccctggctctgctcccagaccataccccgaccttggccctgctgctaccctgcctc

SEQ ID NO: 11799 - DNA, 255 bp, Homo sapiens; identical to SEQ ID NO: 3275

SEQ ID NO: 11800 - DNA, 90 bp, Homo sapiens; identical to SEQ ID NO: 2653

SEQ ID NO: 11801 - DNA, 482 bp, Homo sapiens; identical to SEQ ID NO: 3278

SEQ ID NO: 11802 - DNA, 227 bp, Homo sapiens; identical to SEQ ID NO: 3279

SEQ ID NO: 11803 - DNA, 204 bp, Homo sapiens
gctttgaatagctggctccgatgctgatggggctggacctgttggtgttcaaccaccatcatgtcggccacggtcatatcgaaggggacaggatggtagagtctgacttacacgttttcaacagggatgtgttgcaacatgtggatttcatgcagaaagactaccctgggcttactgtcttccttctgggccactccatgggag

SEQ ID NO: 11804 - DNA, 515 bp, Homo sapiens
gaatttaaggcaaaaaaggtggagagggagatgtgtgagcatcctgcaaggtgaaacaagactcaaaatgacagtttcagagagtcaatgtcattacatagaacacttcggacacaggaaaaataaacgtggattttaaaaaatcaatcaatggtgcaaaaaaaaacttaaagcaaaatagtattgctgaactcttaggcacatcaattaattgattcctcgcgacatcttctcaaccttatcaaggattttcatgttgatgactcgaaactgacagtattaagggtaggatgttgcttctgaatcactgttgagttctgattgtgttgaagaagggttatcctttcattaggcaaagtacaaaattgcctataatacttgcaactaaggacaaattagcatgcaagcttggtcaaactttttccagcaaaatggaagcaaagacaaaagaaacttaccaattgatgttttacgtgcaaacaacctgaatcttttttttatataaatatatattt

SEQ ID NO: 11805 - DNA, 214 bp, Homo sapiens
atgtgcgacaaggagttcatgtgggccctgaaaaacggagacttggatgaggtgaaagactatgtggccaagggagaagatgtcaaccggacactagaaggtggaaggaaacctcttcattatgcagcagattgtgggcagcttgaaatcctggaattcctgctgctgaaaagagcatatattaatgctccagataaacatcatattactcctc

SEQ ID NO: 11806 - DNA, 389 bp, Homo sapiens
  misc_feature 389: n = A,T,C or G
cgttgctgtcggatcggcttgccaaaggatcagaatgttaccaaaagagccttagtttaaatcctttcctctggtctccctttgaatcattatgtgaaataggtgaaaagccagatcctgaccaaacatttaaattcacatctttacagaactttagcaactgtctgcccaactcttgcacaacacaagtacctaatcatagtttatctcacagacagcctgagacagttcttacggaaacaccccaggacacaattgaattaaacagattgaatttagaatcttccaattcaaagtactccttgaatacagattcctcagtgtcttatattgattcagctgtaatttcacctgatactgtcccactgggaacaggaacttccatattn

SEQ ID NO: 11807 - DNA, 575 bp, Homo sapiens
aagcagcagggaaaacctggcgctgcaaaatgtgcaggctcgaatacggatggtcctcgcctatctgtttgctcagttgagcctctggtctcggggtgtccacggtgggctcctcgtgctgggatccgccaacgtggatgagagtctcctgggctacctgaccaagtacgactgctccagtgcggacatcaaccccataggcgggatcagcaagacggacctcagggccttcgtccagttctgcatccagcgcttccagcttcctgccctgcagagcatcctgttggcgccggccaccgcagagctggagcccttggctgatggacaggtgtcccagaccgacgaggaagatatggggatgacatatgcggagctctcggtctatgggaaactcaggaaggtggccaagatggggccctacagcatgttctgcaaactcctcggcatgtggagacacatctgcaccccgagacaggtcgctgacaaagtgaagcggtttttctccaagtactccatgaacagacacaagatgaccacgctcacacccgcgtaccacgccgagaactacagccctg

SEQ ID NO: 11808 - DNA, 519 bp, Homo sapiens; identical to SEQ ID NO: 3281

SEQ ID NO: 11809 - DNA, 511 bp, Homo sapiens; identical to SEQ ID NO: 3282

SEQ ID NO: 11810 - DNA, 503 bp, Homo sapiens; identical to SEQ ID NO: 3284

SEQ ID NO: 11811 - DNA, 591 bp, Homo sapiens; identical to SEQ ID NO: 3285

SEQ ID NO: 11812 - DNA, 624 bp, Homo sapiens
attccgttgctgtcggctgaatgttcatgatcattatcagaacatgaaacatgtaatttcagttgataagtccaagccagataaagccctcagcttgataaaggatgatttttttgacaatattaagaacatagttttggagcatcagcagtggcacaaagacagaaagaatccatccttaaagtcaaaaactaatgatggagaagaaaaaatggaaggaaattcacaagaaacggagagatgtgaaagggcagaatcattagcgaaaataaaatcaaaggccttttcagttgtcatacaggcatccaaatcaagaaggcatcgtcaagtcaaactcgactcttctgactctgattctgcatctggtcaagggcaagtcaaagcaactaggaaaaaagagaagaaagaaagattgaaaccagcaggaaggaagatgtctctcagaaacaaaggcaatgtgcagaatatacacaaggaagataaacctttaagtctgagtatgcctgtaattacagaagaagaagagaatgaaagtttgagtggaacagagttcactgcatccaagaagaggagaaaacactgaacaaagagcctggtgtagtttttaattttgagttttctgac

SEQ ID NO: 11813 - DNA, 300 bp, Homo sapiens
  misc_feature 75, 243, 291: n = A,T,C or G
atttattccacttcttgtatggcctgaagaatctaggaggagaaaaagccagataccaaacttacggccaggcanacgggtcgcgggtgttgacagggtcctgagggagtttgaagccttattctcgagccgcctcctcttctctacccacacttgcaccgaggtcaccccggcaccctccgcaccggttcggttttggtctctgcttgtcctctcagtccttggtactttcgtctccctcanccggaggtggcaaactcagacatctacgggcgcccgaggccctcgcanccctgagcc

SEQ ID NO: 11814 - DNA, 128 bp, Homo sapiens
cctccaccgacctctgcccaccatgggttggaactaaactgttaccttccctcgctccacacaagaagacagcctgcttcaggggtccctgtgctggccaagccactgagcctgcggggaggctggtc

SEQ ID NO: 11815 - DNA, 464 bp, Homo sapiens
tccgttgctgtcgggatgtttacagacaagttcattccattattagacgttccctgccagcaacactaccacagtgtcaggcagcgaacaagacctgccccaccaattacatgtggaataatcacatctgcagatgcctggctcaggaagattttatgttttcctcggatgctggagatgactcaacagatggattccatgacatctgtggaccaaacaaggagctggatgaagagacctgtcagtgtgtctgcagagcggggcttcggcctgccagctgtggaccccacaaagaactagacagaaactcatgccagtgtgtctgtaaaaacaaactcttccccagccaatgtggggccaaccgagaatttgatgaaaacacatgccagtgtgtatgtaaaagaacctgccccagaaatcaacccctaaatcctggaaaatgtgcctgtgaatgtacagaaagt

SEQ ID NO: 11816 - DNA, 366 bp, Homo sapiens
cctttgagaacattgacgacgctaaggatgccatgatggccatgaatgggaagtctgtagatggacggcagatccgagtagaccaggcaggcaagtcgtcagacaaccgatcccgtgggtaccgtggtggctctgccgggggccggggcttcttccgtgggggccgaggacggagccgtgggttctctagaggaggaggggaccgaggctatggggggaaccggttcgagtccaggagtgggggctacggaggctccagagactactatagcagccggagtcagagtggtggctacagtgaccggagctcgggcgggtcctacagagacagttacgacagttacgctacacacaacgagtaaaaac

SEQ ID NO: 11817 - DNA, 399 bp, Homo sapiens
ggcacgaggtggttgaccgcttgcttcttgttattaccaaaacaggaggggaaaaaattaactgctccaaatttaaccataaatcaattcatgtttaacgtttctcattaaaatccagtattatattatcatatctctctttacttaccagtataagatttttgaaaatcctgaataaaccagtatcgttactggcacctgaaattaatttgtgaatttgcaacagtaatcagagttaccattatttaatttgtatgctaaatgaggaggtacattgaaaccctccaaatctccagtctcatctatgtcatattttgccactgcctttcagaagtgatttagttgtggaaagataataaattgatttgttatggttacatatttagcgcacccagagaa

SEQ ID NO: 11818 - DNA, 300 bp, Homo sapiens
cccgggtgaggggcggagctgggggcatggcgtccggagcggctcgctggctagtattggcacccgtcaggtccggggctctccggagcgggcctagcttgaggaaagatggcgatgtctccgccgcatggagcggctcaggccggagcctggtaccgtcgaggtcagtcatcgttacccgcagcggcgccattttgcccaaaccggtgaaaatgtccttcggccttctccgtgtgttctccattgtgatcccctttctctatgtcgggacactcattagcaagaactttgctgctctac

SEQ ID NO: 11819 - DNA, 555 bp, Homo sapiens
gtgtacaaggcccgtgatccccacagtggccactttgtggccctcaagagtgtgagagtccccaatggaggaggaggtggaggaggccttcccatcagcacagttcgtgaggtggctttactgaggcgactggaggcttttgagcatcccaatgttgtccggctgatggacgtctgtgccacatcccgaactgaccgggagatcaaggtaaccctggtgtttgagcatgtagaccaggacctaaggacatatctggacaaggcacccccaccaggcttgccagccgaaacgatcaaggatctgatgcgccagtttctaagaggcctagatttccttcatgccaattgcatcgttcaccgagatctgaagccagagaacattctggtgacaagtggtggaacagtcaagctggctgactttggcctggccagaatctacagctaccagatggcacttacacccgtggttgttacactctggtaccgagctcccgaagttcttctgcagtccacatatgcaacacctgtggacatgtggagtgttggctgtatcttt

SEQ ID NO: 11820 - DNA, 561 bp, Homo sapiens
tgatgttcaagaaccaactgaaccagaggatgaccttgacattatgcttggcaataaaaagaagaaaaagaagaatgttaagttcccagatgaggatgaaatactagagaaagatgaagctctagaagatgaagacaacaaaaaagatgatggtatctcattcagtaatcagacaggccctgcttgggcaggctcagaaagagactacacatacgaggagctgctgaatcgagtgttcaacatcatgagggaaaagaatccagatatggttgctggggagaaaaggaaatttgtcatgaaacctccacaagtcgtccgagtaggaaccaagaaaacttcttttgtcaactttacagatatctgtaaactattacatcgtcagcccaaacatctccttgcatttttgttggctgaattgggtacaagtggttctatagatggtaataaccaacttgtaatcaaaggaagattccaacagaaacagatagaaaatgtcttgagaagatatatcaaggaatatgtcacttgtcacacatgccgatcaccggacacaatcctgca

SEQ ID NO: 11821 - DNA, 552 bp, Homo sapiens
cccattggggatgtggccacccagtactttgctgacagggacatgttctgtgctggccgagtacctgaggaggatctgaagaggacaatgatggcctgtggaggctcaatccagaccagtgtgaatgctctgtcagcagatgtgctgggtcgatgccaggtgtttgaagagacccagattggaggcgagaggtacaatttttttactggctgccccaaggccaagacatgcaccttcattctccgtggcggcgccgagcagtttatggaggagacagagcggtccctgcatgatgccatcatgatcgtcaggagggccatcaagaatgattcagtggtggctggtggcggggccattgagatggaactctccaagtacctgcgggattactcaaggactattccaggaaaacagcagctgttgattggggcatatgccaaggccttggagattatcccacgccagctgtgtgacaatgctggctttgatgccacaaacattctcaacaagctgcgggctcggcatgcccaggggggtacatggtatggagta

SEQ ID NO: 11822 - DNA, 521 bp, Homo sapiens
ggcacgagggccagacagacaatggggattatgcatctttgatgatgtcatagaacactgtagtccagcctcatttaaatacgcagaatatttcttaagaccaatgctccaatatgtatgtgacaacagcccagaagtcaggcaagcagctgcatatggcctgggagtcatggcacagtacggtggagataattatcgccctttttgtacagaagcacttcccctgctggtaagagttattcagtctgcggattctaagaccaaagaaaatgtcaatgctacagagaactgcatctcagcagtagggaaaatcatgaagttcaagcctgactgtgtaaacgttgaagaggtccttccacactggttgtcttggcttccactacatgaagataaagaagaagctgttcagactttcaattatctgtgtgacctgattgaaagtaatcatccaattgttcttggcccaaacaataccaatctgcccaaaatatttagtataattgcggaaggagaaatgcacg

SEQ ID NO: 11823 - DNA, 573 bp, Homo sapiens
ggcacgaggctgcgctggcgctgctgctcttcggcctgctgggtgttctggtcgccgccccggatggtggtttcgatttatctgatgcccttcctgacaatgaaaacaagaaacccactgcaatccccaagaaacccagtgctggggatgactttgacttaggagatgctgttgttgatggagaaaatgacgacccacgaccaccgaacccacccaaaccgatgccaaatccaaaccccaaccaccctagttcctccggtagcttttcagatgctgaccttgcggatggcgtttcaggtggagaaggaaaaggaggcagtgatggtggaggcagccacaggaaagaaggggaagaggccgacgccccaggcgtgatccccgggattgtgggggctgtcgtggtcgccgtggctggagccatctctagcttcattgcttaccagaaaaagaagctatgcttcaaagaaaatgcagaacaaggggaggtggacatggagagccaccggaatgccaacgcagagccagctgttcagcgtactcttttagagaaatagaagattgtcggcagaaaca

SEQ ID NO: 11824 - DNA, 485 bp, Homo sapiens
ggcacgaggctctttgtcctccaggccattggtatcccaggttggggattcagtggctggatctctgctctggtggtgccgaagggcaacacagcagtatccgtgctcatgctgctggtcgccctgctcttcactggcattgctgtgctaggaattgtcatgctgaaacggatccactccttataccgccgcacaggtgccagctttcagaaggcccagcaagaatttgctgctggtgtcttctccaaccctgcggtgcgaaccgcagctgccaatgcagccgctggggctgctgaaaatgccttccgggccccgtgacccctgactgggatgccctggccctgctacttgagggagctgacttagctcccgtccctaaggtctctgggacttggagagacatcactaactgatggctcctccgtagtgctcccaatcctatggccatgactgctgaacctgacaggcgtgtggggagttcactg

SEQ ID NO: 11825 - DNA, 442 bp, Homo sapiens
ggcacgagcggaggtccacttccgcagcatccggtccacggggagcaaacagcgcagccagaaccgctccaagacgcccaagaaccaggaagccctgcggatggccaacgtggcagagaacagcagcagcgaccagaggcaggcctgtaagaagcacgagctgtatgtcagcttccgagacctgggctggcaggactggatcatcgcgcctgaaggctacgccgcctactactgtgagggggagtgtgccttccctctgaactcctacatgaacgccaccaaccacgccatcgtgcagacgctggtccacttcatcaacccggaaacggtgcccaagccctgctgtgcgcccacgcagctcaatgccatctccgtcctctacttcgatgacagctccaacgtcatcctgaagaaatacagaaacatggtggtccgggcctgt

SEQ ID NO: 11826 - DNA, 384 bp, Homo sapiens
gcggtcgcgccggcaagagcagcgggagcggcgcggggaagggggcggtgtccgcagagcaggtgattgctggcttcaaccgccttcggcaggaacagcgaggcctggcatccaaagcagctgagttggagatggagttgaatgagcacagcctagtgatcgatacactgaaggaggtagatgaaactcgtaagtgctaccgcatggttggaggagtgctggtggagcgaactgtcaaagaggtgctgcccgctttggagaacaacaaggagcagatacagaagatcattgagacactgacacagcagcttcaggcaaagggaaaagaactaaatgaattccgggaaaagcacaacattcgtctcatgggagaagatgagaagc

SEQ ID NO: 11827 - DNA, 455 bp, Homo sapiens
taccggctgcgggaggcccaggaccgggcccgagcggaagaccttaatagccgagtctcttactggtctgttggcgagacgattgccctgttcgtggtcagcttcagtcaggtgctactgttgaaaagcttcttcacagaaaaacgacccatcagcagggcagtccactcctagccccggcatcctgctctagggcccctcatgccccaggctggagcagctctcctaggtcacagcctgctgggctgggtcgcgtagcccagggtggaggcagaacgatgctgctgtggtagccctttgcctttcatgcccatgcttgattcttgcacctcagcagctgaaggtctcagagaccagtaatcagaaggcatccgactgcattaagtgtgcagcgctgaaaagacatttacaactaggccagggattagccactgtgggagggtggacaggcaatg

SEQ ID NO: 11828 - DNA, 210 bp, Homo sapiens
caagggacactttaatggttaacttaagggatcatcaattttgcctcactacctacaaagggaatttcatcttgtccccatgctgagtagggaaacagggacaaagttaatcataataccctacatcaaaaaaaaactaagctaacactgctaactttttttttaacaggcaaaatataaatatatgccctctaaaatgcccaagggttt

SEQ ID NO: 11829 - DNA, 488 bp, Homo sapiens
gtcggaaaagaacatagagataggaagtcatctgactctgacagctcagactctgagagtgatacaggcaagagggcaaggcacacatcaaaagacagcaaggcagcaaagaagaagaaaaagaagaagaagcacaagaagaagcacaaggagtgagagtataaagagtgtagggggtggttgagagtaagaaaccaggagccttgtgccttgagactcctggaaagactcaatagtgagaatatagcctcccaccccattaacttcgctcccatgggagatggcttcccctcatgcaacaggcaggtttgggagttagaggtcaaaagcagctgcctgaatgagttgttgtttccttatcactcctggtccctttgcaagtgaaccctgcagctcacccattcattcacccaacttccttcattcagcaggaggtcctattaccctctccagctgccactgccagagctggattcctgtaaaggagt

SEQ ID NO: 11830 - DNA, 512 bp, Homo sapiens; identical to SEQ ID NO: 3291

SEQ ID NO: 11831 - DNA, 269 bp, Homo sapiens; identical to SEQ ID NO: 3292

SEQ ID NO: 11832 - DNA, 568 bp, Homo sapiens
ccgttgctgtcgggctgcctggccggtgctgttggggctgctgctggcgctgttagtgccgggcggtggtgccgccaagaccggtgcggagctcgtgacctgcgggtcggtgctgaagctgctcaatacgcaccaccgcgtgcggctgcactcgcacgacatcaaatacggatccggcagcggccagcaatcggtgaccggcgtagaggcgtcggacgacgccaatagctactggcggatccgcggcggctcggagggcgggtgcccgcgcgggtccccggtgcgctgcgggcaggcggtgaggctcacgcatgtgcttacgggcaagaacctgcacacgcaccacttcccgtcgccgctgtccaacaaccaggaggtgagtgcctttggggaagacggcgagggcgacgacctggacctatggacagtgcgctgctctggacagcactgggagcgtgaggctgctgtgcgcttccagcatgtgggcacctctgtgttcctgtcagtcacgggtgagcagtatggaagccccatccgtgggcagcatgaggtccacggcatgcccagt

SEQ ID NO: 11833 - DNA, 547 bp, Homo sapiens; identical to SEQ ID NO: 532

SEQ ID NO: 11834 - DNA, 487 bp, Homo sapiens
ccgttgctgtcgaaactgagccagtggccaaacaaccgtgctcagcctgtttctctctgccctctagagcaaggcccaccaggtccatccaggaggctctcctgacctcaagtccaacaacagtgtccacactagtcttagccaatattaaaacatactatgaagcctctgatacttaaacagcatggcgctggtacgtaaatagaccaatgcagttaggtggctctttccaagactctggggaaaaaagtagtaaaaagctaaatgcaatcaatcagcaattgaaagctaagtgagagagccagagggcctccttggtggtaaaagagggttgcatttcttgcagccagaaggcagagaaagtgaagaccaagtccagaactgaatcctaagaaatgcaggactgcaaagaaattggtgtgtgtgtgtgtgtgtgtgtgtgtgtgtgtgtgtataatttaaaaaaagtttttattgagatacaagt

SEQ ID NO: 11835 - DNA, 343 bp, Homo sapiens
ttcggcacgaggccaaacgtaccaagaaagtcgggatcgtcggtaaatccgggacccgctatggggcctccctccggaaaatggtgaagaaaattgaaatcagccagcacgccaagtacacttgctctttctgtggcaaaaccaagatgaagagacgagctgtggggatctggcactgtggttcctgcatgaagacagtggctggcggtgcctggacgtacaataccacttccgctgtcacggtaaagtccgccatcagaagactgaaggagttgaaagaccagtagacgctcctctactctttgagacatcactggcctataataaatgggttaatttatgt

SEQ ID NO: 11836 - DNA, 382 bp, Homo sapiens
gccgccagccagagggccgagagccgcggggagaaggccatcacccaggtcagcaagggcacctgcgagcaaggtccttccatagtgacgccccccaaggacatctggaatgtcactggtgcccaggtgtacttgagctgtgaggtcatcggaatcccgacacctgtcctcatctggaacaaggtaaaaaggggtcactatggagttcaaaggacagaactcctgcctggtgaccgggacaacctggccattcagacccggggtggcccagaaaagcatgaagtaactggctgggtgctggtatctcctctaagtaaggaagatgctggagaatatgagtgccatgcatccaattcccaaggacaggcttcagcatcagcaa

SEQ ID NO: 11837 - DNA, 224 bp, Homo sapiens
tttccttcttttttttttgaaacaggttctcactctgtcaccgaggttggagggcaggggaatgataatagctgactgcagcctcaaccttctgggctcaaaggatcctttcacctcagcctcctgagtagctgggaccacaggggggggccaccacaccgggctaattttaagggattttttttcctttttttttttacccatggtgcccagggtggacttgg

SEQ ID NO: 11838 - DNA, 353 bp, Homo sapiens
ctgtctcaagccaagctgtgaaaaccctagacgcacccgcagggagggtggggagagctggcaggcccagggcttgtcctgctgaccccagcagaccctcctgttggttccagcgaagaccacaggcattccttagggtccagggtcagcaggctccgggctcacatgtgtaaggacaggacattttctgcagtgcctgccaatagtgagcttggagcctggaggccggcttagttcttccatttcacccttgcagccagctgttggccacggcccctgccctctggtctgccgtgcatctccctgtgccctcttgctgcctgcctgtctgctgaggtaaggtgggaggaagg

SEQ ID NO: 11839 - DNA, 285 bp, Homo sapiens
cgggcaggtacaccctggacaagttagttaacctctctgagctggcttcctcgttgttcaacaatctccccaccttttttttttgaaatagagcctggccctgtcacccaagctggagggcaaaggctcaatcacagttcactgcagccttgacctcctgggctaaagcagtcctcccgcctcagcctcccaggtagctgggattacaggcacacaccactacaacaggctgttttgcatcttttgtaaacatgggttttaccgcgttgcccggcaggtctcaaa

SEQ ID NO: 11840 - DNA, 399 bp, Homo sapiens; identical to SEQ ID NO: 3294

SEQ ID NO: 11841 - DNA, 373 bp, Homo sapiens
ggccaggtgtttcgaggtaggcttgccttctggcagcatggactttgttaaaataataggcggaaagaagaggcctgggaagggcccccagtcttttggaatgtcctggtcacagggtcatgtcagctgccagttctcgtctcccgtcctggagttgctcggtcttgcggagctgcccgcctgcctgttctggcggctccagcgcaggctgtccctgctgctttgattccaggtgattttattttttttatttttttattttttttgagacggagtcttgctctgttgcccaggcaggagtgcagtggcgcatctcggctcactgcaacctctgtctcaagcgattctcctgcctcgcctcctgagtagctgg

SEQ ID NO: 11842 - DNA, 522 bp, Homo sapiens; identical to SEQ ID NO: 3295

SEQ ID NO: 11843 - DNA, 163 bp, Homo sapiens
gtgcggccctggggacccccccctccccgagtgtgcccaggaactcagagagggcgcggcccccggggattcccccccgagggtgcccaggactcggaaggggcgccccggactcgacaagctggaccccctgctcccgggggggcgagcgcatgaccccccc

SEQ ID NO: 11844 - DNA, 544 bp, Homo sapiens
cgttgctgtcggaaggactgcgggtgtgtgtgtgtatgtgtgtgtgtatgtgtgtgcgcgcgtgcgtgcgtgtgtgtgcgcgcgctagtgtgtggacaaggaggtgggggcagctgagttagagtcccaactcttggactccatttgctattctcttctttctcccccacacctatctggtggtggtagtgggcgtttatatttgcgttccttttcattcatttctaaatctcttaaaaattttgggttgggggtattggggaaggcaggaaagggaaaaggagagtagtatctgaagagcaagaggaggacatggagatgaagaagaagattaacctggagttaaggaacagatccccggaggaggtgacagagttagtccttgataattgcctgtgtgtcaatggggaaattgaaggcctgaatgatactttcaaagaactagaatttctgagtatggctaatgtggaactaaattcgctggcccggcttcccagcttaaataaacttcgaaaattggagcttagtgataatataatttctg

SEQ ID NO: 11845 - DNA, 452 bp, Homo sapiens
aatataataaaaaacccgcagtttgtgttcgacgtgcaaacatctgataacatggatgcggtgctccttgtcattgcacagaccttcatggacgcctgcaccctggccgaccacaagctgggccgggactccccgatcaacaaacttctgtatgcacgggacattccccggtacaagcggatggtggaaaggtactatgcagacatcagacagactgtcccagccagcgaccaagagatgaactctgtcctggctgaactgtcctggaactactccggagacctcggggcgcgagtggccctgcatgaactctacaagtacatcaacaagtactatgaccagatcatcactgccctggaggaggatggcacggcccacaagatgcagctgggctatcggctccagcagattgcagctgctgtggaaaacaaggtcacagatctataggaacc

SEQ ID NO: 11846 - DNA, 377 bp, Homo sapiens
  misc_feature 377: n = A,T,C or G
cgttgctgtcgagttgatgttgctctgggaatcctgattgagagccgcaaacaggaaaaggcctgcgagcagccggccctggcgggggctgataacccagagcactcccctccctgctccgtgtcgcctcacacaagttctgggagcagcagtgaggaagaggacagtgggaaacaggcactggctccaggcctcagcccttcccagaggccggggggttccagctctgcctgtagcaggagccctgaggaggaggaggaagaggatgtgctgaaatacgtccgggagatctttttcagctagggcataaactgtgcactgaactgtctgccgagagcagctggaggacagctgagcttccactggtgctgctgggn

SEQ ID NO: 11847 - DNA, 82 bp, Homo sapiens
aacgagactaaaaaaggcaaaagctgcagaaactagaaattcatctgaacaggaattaagaataactcaaagtgaatttgat

SEQ ID NO: 11848 - DNA, 382 bp, Homo sapiens; identical to SEQ ID NO: 3299

SEQ ID NO: 11849 - DNA, 203 bp, Homo sapiens
ccgttgctgtcgagaaaggaaactattgcaaaataagagactggatttggatgcgtgcggaaacgagactaaaaaaggcaaaagctgcagaaactagaaattcatctgaacaggaattaagaataactcaaagtgaatttgatcgtcaagcagagattaccagacttctgctagagggaatcagcagtacacatgcccatcac

SEQ ID NO: 11850 - DNA, 181 bp, Homo sapiens
caatgaccagaaagtgtgtgcctcccaaaagccgcccaaagacctgggctacatctacttctaccagagagtggccagctaagagcctgcctgaccccttaccaatgagggcaggggaagaccacctggcatgatggagaggggctgacggatggacttcagcccctctggtctgaaccct

SEQ ID NO: 11851 - DNA, 388 bp, Homo sapiens
gcattgctactacgagctaccttctacctgcttattggcaatgccaatgcagccaaaccagatttagataaagtcatcagtttgaaagaagctaatgtgaagcttcgagcaaatgctctcatcaaaagaggcagcatgtacatgcaacagcagcagcctttgctgtccactcaagattttaacatggctgctgacatcgatcctcagaatgcagatgtttatcaccaccgaggacagctgaaaatactccttgatcaagttgaagaagcagtggcagattttgatgaatgtattaggttaagacctgagtctgctctggcacaagcacagaaatgttttgcattgtaccgccaggcatatacgggaaacaactcttcacaaatccaag

SEQ ID NO: 11852 - DNA, 356 bp, Homo sapiens; identical to SEQ ID NO: 3300

SEQ ID NO: 11853 - DNA, 646 bp, Homo sapiens
ttccgttgctgtcgatacctgcaactgaggattcttcccggggagaccgcagcccatcggcatggctcaagagtttgtgaactgcaaaatccagcctgggaaggtggttgtgttcatcaagcccacctgcccgtactgcaggagggcccaagagatcctcagtcaattgcccatcaaacaagggcttctggaatttgtcgatatcacagccaccaaccacactaacgagattcaagattatttgcaacagctcacgggagcaagaacggtgcctcgagtctttattggtaaagattgtataggcggatgcagtgatctagtctctttgcaacagagtggggaactgctgacgcggctaaagcagattggagctctgcagtaaccacagatctcataggaaatgttcaacaattctgtgaaaggtcacaggacccaattggagaaatcatatgaaaagcatagttggtcttggtgtcatatggatcagaggcacaagtgcagaggctgtggtcatgcggaacactctgttatttaagatggctatccagataatcctgaacactgtgtatttattttatttagactaccagcaaagattaaagcatgaaatgtaaaacatctgataaaacttacagccccctacacc

SEQ ID NO: 11854 - DNA, 648 bp, Homo sapiens
  misc_feature 384, 489, 490, 491, 493, 495, 496, 497, 499, 502, 527, 532,545, 547, 562, 570, 575, 579, 594, 599, 603, 606, 620, 637,645, 647: n = A,T,C or G
ggcacgagctcatgcctgtaatcccagcactttgggaggctgaggcgggtggatcacctgaggtcaggagttcaagaccagcctgaccaacatggagaaaccccgtctctactaaaagtactaaaaaattagccgggtgtggtggcgtgtgctggtagtcccagctacttggggggctgaggcaggagaattgtttgaacccgggaggtggaggttgcagtcagccgagatagtgccactgtactccagcctgggcgacagagtgagactgtactccagcctgggcgacagagtgagactccatctcaaaaaataataaaataaaataaaataaataaataaataaaatagaagggagagacttacgtcagaacttcccacctncccaccacatgccacagaacaaggctttaaggagctatttctgctgttcttccccctcccatattaaataaaaaggtgtgttctgcaggtaggaaaaaaaaaaannnancnnnantgnaaaaaaaaacccggccctttaaaanttttnggggggccttttncnaaatcccacctgatnaaaaaccnttggngaanttggggaaaaccccnacttnaaangcngggaaaaaaaagcntttttttgggaaaattngggaggcntnt

SEQ ID NO: 11855 - DNA, 370 bp, Homo sapiens
acagaaaaactttctatttgtacgactttgggataggaatatggacatagctatgggctggaagggtgcccacgccatgcagttgggacaacctttggttattgacatggcttacgaaaattatatgacacgaaaagaattgcggaatactgtttcccagcttttagaaagtgaaggatggaacacaagaaatgttgatcctttccatatttatttctgcaatctaaaaatagatggtgctttgcacagagagttagttaaaccgtatcaagaaaaatgggacaaattgcttttaacatcaacagaaaagtctcatgtacatttatttcctaaggacagtattatctatttaactgcagattctcccaat

SEQ ID NO: 11856 - DNA, 300 bp, Homo sapiens
gttcttcataataataggccacaaaagggctctgtggtttgcctccatgtgcactggcccctccccacccctagggggcactcagtagctgctgagaaggcctgtccacgaggctgttggaacccctccaataaatacttagaggtagtgtatctgatgcttgttttcatggagaaacttgtattggagaacttaaaacatcacgaatatttttaataggatccgcagacacccaaaggagaagcttggtcttttccaggtatttccaacttgagttcaacccaaagcctttgaaaggaa

SEQ ID NO: 11857 - DNA, 391 bp, Homo sapiens
tccgttgctgtcggattcaccccaccccattttcttgtgtctggaccatccgatgagacggatgctctgatgctctgaggcttctgggaggctgggccctggaggcaacgtgctgcaggcgcactctgtcagagtgaacagcaccgcgagacaggccaggctcgtggctcggaagacaaaccccacacacactcaaggggtcgagaacaaaccccacaccagggctctcaccttcttctcctaagtaggatttattttcagcacctgtttgatgcagtttttaatcctctacctattgcactggtgtgactcgttggccattatttgatttttgcacgaaaaaaagctttggtatagaaatcagcatactatttttttaaatctggagaga

SEQ ID NO: 11858 - DNA, 563 bp, Homo sapiens; identical to SEQ ID NO: 3302

SEQ ID NO: 11859 - DNA, 384 bp, Homo sapiens
  misc_feature 323, 331, 333, 339, 340, 341, 342, 347, 353, 354, 370, 373,375, 377, 378, 380: n = A,T,C or G
attataatagattataagctcacgcctataatcccagcactttgggaggcggaggcgggtggatcacctgaggtcaggagtttgagaccagcttgatcaacatggtcgaaaccctgtctctactaaaaataaaaattaattaccatgcaataagaatttgccaggcatggcggcgcatgcctgtaatccctgcaatgcctgtactcgggaggctgagacaggagaatcacttgaacccggtaggtggaggttacagtgaaccgaaactgagccactgcacgccagcctgggtgacagagaccagactccatctctctgaattncttaaaantnaaatgnnnntaacncccccnngggggccggggggggnggntnanncntata

SEQ ID NO: 11860 - DNA, 340 bp, Homo sapiens
ccacggcgattcttcccgcagagttgtgaagcgaaaggcttacaattaaaaggaagaaaaaaaaataaagataattcgggagtacaattgacaaagcgtgtgggtcgctcagcctccagcagtaactgctgatctccagttcttggagggttccggtgagaagaacgcccctactgcggtactgaggaagcggcaggaggagatgcggcccctggacatagacgaggtggaagcgcctgaggaagtggaggtgctggagcccgaggaggatttcgagcagttcctgctcccggtcatcaacgagatgcgcgaggacatcgcgtctcttatacgcgagcac

SEQ ID NO: 11861 - DNA, 400 bp, Homo sapiens
ctgaatgttctgtttattggggtgttgccatgggtaggaggctcagcagagccattctgcctcctgcttcccagtactaccccgtccagcaactgcctctcgtataaataagtatcaagatggtcagtagaaaaggagagcatctcctcagccctggaagacagtgtgggagcttcagcttaaggaagaggtaggtgcctgtccgccagcccagcctaaagggccaggaagacctggctatgggtgctggaggggccgttagccacaccccaaggttctacagtctttggtttggatcaggctgcatgccacggtcctggctggcagacccacccaccctgcgcctgtgacacacacccagcgcttttacctgcaggggcccggcattggatggggccct

SEQ ID NO: 11862 - DNA, 572 bp, Homo sapiens; identical to SEQ ID NO: 2538

SEQ ID NO: 11863 - DNA, 534 bp, Homo sapiens; identical to SEQ ID NO: 537

SEQ ID NO: 11864 - DNA, 593 bp, Homo sapiens
ggcacgagatttgaaaacaacttaaatttttagacaaatgattttagtatataaatttgcttttgtttttatacagaatataaagatttccctcattaatcttccatgtgaagggtattacaagcctggaggaagatactttctgcacacaagtatgtatcttatgtgtgcagtattggaaaccaatggtgtagtgctcctacacataaatggggtcaagtgacatcacaaattaaaagggggaaagagaaatattctagttaatcagatgcaagaagcaaacaagacgcaaaaactgtgcaaataagaccaagccagtaactttagttacgacactgcagattacactggaataacaggtttgtgaggctatagtgtgcaccacattaaaacagcaagaaagagctatttatatagaaaggctggaatgagggatttttactaaagcaaattaacttcttgtcaactgccaaaacaaaacaaaactgagcatatgagtgttagtatactgaaggcatgttataccagtttctgtgcagcatgctaaaagttagaactttttcactggtgcttatcaatcattaatagtcacg

SEQ ID NO: 11865 - DNA, 55 bp, Homo sapiens
atctttggggtctcctgaaaacttcccttaaaattagctctgagggaaaaatcaa

SEQ ID NO: 11866 - DNA, 555 bp, Homo sapiens
caaggaggtcctcccagccatccgaggctacgtgcactacttcttcggctgccgagactgcgctagccacttcgagcagatggctgctgcctccatgcaccgggtggggagtcccaacgccgctgtcctctggctctggtctagccacaacagggtcaatgctcgccttgcaggtgcccccagcgaggacccccagttccccaaggtgcagtggccaccccgtgaactttgttctgcctgccacaatgaacgcctggatgtgcccctgtgggacgtggaaaccaccctcaacttcctcaaggcccacttctccccaagcaacatcatcctggacttccctgcagctgggtcagctgcccggagggatgtgcataatgtggcagccgccccaaagctggcgatgggagccctggagctggaaagccggaattcaactctggaccctgggaagcctgagatgatgaagtcccccacacacaccaccccacatgtgccggctgagggacctgagcttatttgaagtcctgcctcattctcactggagcctcagtctct

SEQ ID NO: 11867 - DNA, 295 bp, Homo sapiens
ggccaagccgtgtggggtgcgcctgagcggggaagcccgcaaacaggtggaggtcttcagacagaatcttttccaggaggctgaggaattcctctacagattcttgccacagaaaatcatatacctgaatcagctcttgcaagaggactccctcaatgtggctgacttgacttccctccgggccccactggacatccccatcccagaccctccacccaaggatgatgagatggaaacagataagcaggagaagaaagaagtccctaagtgtggatttctccctgggaatgagaaa

SEQ ID NO: 11868 - DNA, 143 bp, Homo sapiens
ggcacgagactaagcaagcttttgtgtttattatcctcatttttactgaacattgttagttttggggtaatggaaacccactttttcattgtaatgactttgggggcttttgttagtaagggtgggtggggtgatgggttgca

SEQ ID NO: 11869 - DNA, 606 bp, Homo sapiens
aaaacctataagccaaggtgttccctgcctaaacttattgctgttcccacaaaggactaagcctgttcataagttaccaaagttgccattttggagatggaaattgacgaggagggaaggtcttttattggagagtatacagtacaagcagatcattctgccttagaggtgctaattcccgaaattagaagaccctttcttttccagtaacgaagttataaatatcagcttgttcatccaagccactggctgaggtgttaggaagaggaagagggtggtagaggaggtaagacagtagggaaagacaagggcccatgctcttagtggggaaaactcttggagccgtttactttgagctttgaacactgaaaccattgttggcagggttcagtcactgacagcacaagtttcactgaattgatccaagagtttagtgatttcaaaagccttggtctcaggagaagattaaactttcatattgggcagtggttcactttaaaacacacacatacacacacaaaacaattttttaagaaatcctaataagtaacatacccaaaatgctctgtcttgagtcatgagaaccatcagttcttgatattgtct

SEQ ID NO: 11870 - DNA, 556 bp, Homo sapiens
gggccctcaagtctccgtctggagtaaggtgctgcggagcgacgcggcctgggaggataaggatgaatttttagatgtgatctactggttccgacagatcattgctgtggtcctgggtgtcatttggggagttttgccattacgagggttcttgggaatagcaggattctgcctgatcaatgcaggagtcctgtacctctacttcagcaattacctacagattgatgaggaagaatatggtggcacgtgggagctcacgaaggaagggtttatgacctcttttgccttgttcatggtcatttggatcatcttttacactgccatccattatgactgatggtgtacagctcccaagtgctccctatccagtccaaaggaccctcttgattacagcacaggaacttgatcgttggggaaccccagccccttggaacttggaagacccgtgtttcctggaccgcgaatcagtgtgttgggcatcagtgttttctgcaacggttgtgacctgaaactttttaaaaaccacccacctttggggaagcatttctgaatttat

SEQ ID NO: 11871 - DNA, 500 bp, Homo sapiens
cggtgctgctgctgaacccagctctgggggaccggctggtggcgggcagcacagatcagctgttgagcgccttcgtcccgcctgaggagccccccttgcagccggcccgctggctggaggcctcagaggaggagcgccaagtgggcctgcggctgcgcatctgccacgggaagccagtgacgcaggtgacctggcacgggcgtggggactacctggccgtggtgctggccacccaaggccacacccaggtgctgattcaccagctgagccgtcgccgcagccagagtccgttccgccgcagccacggacaggtgcagcgagtggccttccaccctgcccggcccttcctgttggtggcgtcccagcgcagcgtccgcctctaccacctgctgcgccaggagctcaccaagaagctgatgcccaactgcaagtgggtgtccagcctggcggtgcaccctgcaggtgacaacgtcatctgtgggagctacgatagcaagctg

SEQ ID NO: 11872 - DNA, 505 bp, Homo sapiens; identical to SEQ ID NO: 539

SEQ ID NO: 11873 - DNA, 300 bp, Homo sapiens
ctcttctcctcgttcctctgaaccctccaccaatgtgcctcagcctgtgtgctgtgtggcaacagcattctggttcccactgccaagatctcccaccactctgctgggatctgcagtggcagggagtgggggttgtgtaaaggggaagtcatcttttgagatccagatagacatggtttgtgcacttacgtccagatgggaagcatccttcctgcaaccctaaaataatcatgcagcctctcagacggacgccatcggtcccaaggccttaggtggaggaagcaaagcaggccaggcctg

SEQ ID NO: 11874 - DNA, 750 bp, Homo sapiens
  misc_feature 377, 586, 595, 619, 687, 699, 708, 716, 720, 731, 739, 749: n = A,T,C or G
cgcgaaggctaaagctgactgtgacatcagcaggttgaaggagcagctcaaggctgcaacggaagcactgggggagaagtcccctgacagtgccacggtgtccggatatgatataatgaaatctaaaagcaaccctgacttcttgaagaaagacagatcctgtgtcacccggcaactcagaaacatcaggtccaagagtctgaaggaaggcctgacggtgcaagaacggttgaagctctttgaatccagggacttgaagaaagactaggtgtgtcccatccaagttgagcacgcgccttccccagcttgcagcagcacaccccaagcgctgcttttcacctgtacctttgttttattattattattattattgctgntgttgtcatcgttaactgtgggcatggaatgcgtgaggctggcttctgggttgtccacaccactctctgctgtgttgacttcctgttgtcttcatcaaagcttttttccgtggtattctaaaattaggccagcagtgggggctgggagggcatctgtgttaatactttccttggcttgtgacccccacactcacttgtcagtattaaangcccaacanccttgttgataagctccctgtctnaccatgttctggtgtggaaacgggcccacccagcacgccttaaggtagattggaatcccactggtcanagaaaaactatncggacactncacttggnctgngttacacactnacttctanccgctagttng

SEQ ID NO: 11875 - DNA, 366 bp, Homo sapiens
  misc_feature 163: n = A,T,C or G
tgtttcggtcttgttgcccaggctggagtgcaatggcacgatctcggctcaccgtaacctccgcctcctgggttcaagcaattctccctgcctcagcctcccaagtagctgggattacaggcacctaccaccatgcccggctaatttttgtattttttagtanagacagggttttgtcatgttggtcaggttggcctctaactcctggcctcaggtgatacgcctatctcgacctcccaaagcactgggattacaggcatgagccaccacatccggccagcattttaacagataatagagcacattctccattgaactcttccaaaagaatgttacctggactcctgcaaaccagtgactgaaatg

SEQ ID NO: 11876 - DNA, 491 bp, Homo sapiens; identical to SEQ ID NO: 543

SEQ ID NO: 11877 - DNA, 425 bp, Homo sapiens
ggcttagcggataacaatttcacacaggatggattggtcatgaactcggtttaagacagggcttcttcaccattgcgagagcgttcaccgggacgagtggcaagagtcttggcttggatagcatgaagagccccagtacaaggaagaatactggaaatgctcaattcgtggagcgcgtttaaacgacgatttatttggttttcaatgaccgaggacttatgacaggatgattacatttgaccttgggacatgaacgcttggactgctgacttgtgtgtaaagctgttttgtttgtttgtgtcttgcttgacagagggtctcgatcatggtgatacctgatgctttggacatgtccacttactcctctattattcgttggatcattgtttattctgatagatagtgacttatgttcggatgtcgat

SEQ ID NO: 11878 - DNA, 826 bp, Homo sapiens
tttaggcttctgcaggggactctgtacatgtgcgttggcattatggatcgatttttacaggttcagccagtttcccggaagaagcttcaattagttgggattactgctctgctcttggcctccaagtatgaggagatgttttctccaaatattgaagactttgtttacatcacagacaatgcttataccagttcccaaatccgagaaatggaaactctaattttgaaagaatcgaaatttgagttgggtcgacccttgccactacacttcttaaggcgagcatcaaaagccggggaggttgatgttgaacagcacactttagccaagtatttgatggagctgactctcatcgactatgatatggtgcattatcatccttctaaggtagcagcagctgcttcctgcttgtctcagaaggttctaggacaaggaaaatggaacttaaagcagcagtattacacaggatacacagagaatgaagtattggaagtcatgcagcacatggccaagaatgtggtgaaagtaaatgaaaacttaactaaattcatcgccatcaagaataagtatgcaagcagcaaactcctgaagatcagcatgatccctcagctgaactcaaaagccgtcaaagaccttgcctctccactgataggaaggtcctaggctgccgtggcccctggggatgtgtgcttcattgtgccctttttcttattggtttagaactcttgattttgtacatagtcctctggtctatctcatgaaacctcttctcagaccagttttctaaacatatattgaggaaaaataaagcgattggtttttcttaagg

SEQ ID NO: 11879 - DNA, 261 bp, Homo sapiens
ggcttagcggataacaatttcacacaggagaccattgcactggagagaaaacccataaatgccccgaatgtgggagagcctttttttatcagtcattccttatgagacatatgaaaattcacactggagagaaaccgtatgaatgtgggaaatgtgggaaagcctttagatattccttacaccttaataaacatttaagaaagcatgttgtgcagaagaagccctaccaatgtgaagaatgtgggaaagtcattccggagt

SEQ ID NO: 11880 - DNA, 539 bp, Homo sapiens
  misc_feature 235: n = A,T,C or G
tgagatgatatcatttacgggggaaggcgctttgtgaagtagccttatttctcttgtcctttcgtacagggaggaatttgaagtagatagaaaccgacctggattactccggtctgaactcagatcacgtaggactttaatcgttgaacaaacgaacctttaatagcggctgcaccatcgggatgtcctgatccaacatcgaagtcgtaaaccctattgttgatatggactctanaataagattgcgctgttatccctaaggtaacttgttccgttggtcaagttattggatcaattgagtatagtagttcgctttgactggtgaagtcttagcatgtactgctcggaagttgggttctgctccgaagtcccccaaccgaaatttttaatgcaggtttggtagtttaagaactgtgggtttgttagtactgtttgcattaataaattaaagctccataaggtctctcgtcttgctgtgtcatgcccccctcttcaccgggcaggtcaattcactgggtttaaaattagaaaaaactgaa

SEQ ID NO: 11881 - DNA, 163 bp, Homo sapiens; identical to SEQ ID NO: 2683

SEQ ID NO: 11882 - DNA, 613 bp, Homo sapiens
  misc_feature 613: n = A,T,C or G
aaccctgttcttgggtgggtgtgggtataatgctaagttgagatgatatcatttacgggggaaggcgctttgtgaagtaggccttatttctcttgtcctttcgtacagggaggaatttgaagtagatagaaaccgacctggattactccggtctgaactcagatcacgtaggactttaatcgttgaacaaacgaacctttaatagcggctgcaccattgggatgtcctgatccaacatcgaggtcgtaaaccctattgttgatatggactctagaatgggattgcgctgttatccctagggtaacttgttccgttggtcaagttattggatcaattgagtatagtagttcgctttgactggtgaagtcttagcatgtactgctcggaggttgggttctgctccgaggtcgccccaaccgaaatttttaatgcaggtttggtagtttaggacctgtgggtttgttaggtactgtttgcattaataaattaaagctccatagggtcttctcgtcttgctgtgttatgcccgcctcttcacgggcaggtcaatttcactggttaaaagtaagagacagctgaaccctcgtggagccattcatacaggtccctattn

SEQ ID NO: 11883 - DNA, 103 bp, Homo sapiens
ggcttagcggataacaatttcacacaggacgactccaagcaagtagctttccacatttgtcacagaaatcagaggagagatggtgttgggagccctttggaga

SEQ ID NO: 11884 - DNA, 627 bp, Homo sapiens
aatatggaagggtgattcgtcaacccgtgggcaggattttctttgcgggcacagagactgccacaaagtggagcggctacatggaaggggcagttgaggctggagaacgagcagctagggaggtcttaaatggtctcgggaaggtgaccgagaaagacatctgggtacaagaacctgaatcaaaggacgttccagcggtagaaatcacccacaccttctgggaaaggaacctgccctctgtttctggcctgctgaagatcattggattttccacatcagtaactgccctggggtttgtgctgtacaaatacaagctcctgccacggtcttgaagttctgttcttatgctctctgctcactggttttcaataccaccaagaggaaaatattgacaagtttaaaggctgtgtcattgggccatgtttaagtgtactggatttaactacctttggcttaattccaatcattgttaaagtaaaaacaattcaaagaatcacctaattaatttcagtaagatcaagctccatcttatttgtcagtgtagatcaactcatgttaattgatagaataaagccttgtgatcactttctgaaattcacaaagttaaacgtgatgtgctcatcagaa

SEQ ID NO: 11885 - DNA, 570 bp, Homo sapiens
ttccgttgctgtcgtagacgtgttgggatgttggctgtactcttgaaggtggttcgcacggagagtcttttgggcctttgaaaagggatgtccccttccattgtgagatgtgtccctggcgttggaatctactttggcactctctactctttgaagcagtatttcttgcgaggccatcccccaaccgccctggagtcagtcatgctgggggtgggctctcgctctgttgcaggggtctgtatgtcacctatcactgtaatcaagacgcgctatgagagtgggaaatatggctatgagagtatctacgctgccctgaggagcatctatcacagtgaggggcaccggggcctcttcagtggcctgacagcaactctccttcgagatgcgcccttctcaggaatctacctgatgttttacaaccagaccaaaaatatagtgcctcatgaccaggtggatgcaacccttattcctattacaaatttcagctgtgggatatttgctggtattctggcctcactggtaactcaacctgcggatgttatcaaaactcatatgcagctttatccactg

SEQ ID NO: 11886 - DNA, 300 bp, Homo sapiens; identical to SEQ ID NO: 3317

SEQ ID NO: 11887 - DNA, 539 bp, Homo sapiens
ccgttgctgtcgatccgggaccggcggttgtctgtggccggaggctgatcagtgggctagaacagatcagacattttgtaatgatgcctgaaataaacactaaccacctcgacaagcaacaggttcaactcctggcagagatgtgtatccttattgatgaaaatgacaataaaattggagctgagaccaagaagaattgtcacctgaacgagaacattgagaaaggattattgcatcgagcttttagtgtcttcttattcaacaccgaaaataagcttctgctacagcaaagatcagatgctaagattacctttccaggttgttttacgaatacgtgttgtagtcatccattaagcaatccagccgagcttgaggaaagtgacgcccttggagtgaggcgagcagcacagagacggctgaaagctgagctaggaattcccttggaagaggttcctccagaagaaattaattatttaacacgaattcactacaaagctcagtctgatggtatctggggtgaacatgaaattgattacatt

SEQ ID NO: 11888 - DNA, 386 bp, Homo sapiens
caagatctgtgcgaggaggccctgcggcactatgaggacttccccaagctgtggatgatgaaggggcagatcgaggagcagaaggagatgatggagaaggcgcgggaagcctataaccaggggttgaagaagtgtccccactccacacccctgtggcttttgctctctcggctggaggagaagattgggcagcttactcgagcacgggccattttggaaaagtctcgtctgaagaacccaaagaaccctgggctgtggttggagtccgtgcggctggagtaccgtgcggggctgaagaacatcgcaaatacactcatggccaaggcgctgcaggagtgccccaactccggtatcctgtggtctgaggccatcttcctcgaggcaag

SEQ ID NO: 11889 - DNA, 427 bp, Homo sapiens
gcatgcaccaccatgtccagctaatttttgtattttttagtagagacggggtttcactatatgttggccaggctggtctcaaacttctgacctcaagtgatccactcaccttggcctcccaaagtgctgggattacagacgtgagccaccatgcccggccaggattttccactcttgaagggagtattttgttgtcacttcaactcgctgttttttttccagacaacctcaaatatgaccacactacagcctgtacacaacaagacagtttatcttgtccatggggtaagtgtatgcctgatctttttaattcagtacaatctctgaaggtgttaacactaatgttttacaagaatgtagaggcgactcggtgctatgaagcgtgttaaacaactcacacaattgctacaaaacaccagggaggggc

SEQ ID NO: 11890 - DNA, 430 bp, Homo sapiens
gtggcctgaattggaccgaaggcctgagttggatggaagtctcaaggcttgagttagaagtcttaagacctgggacaggacacatggaaggcctaagaactgagacttgtgacacaaggccaacgacctaagattagcccagggttgtagctggaagacctacaacccaaggatggaaggcccctgtcacaaagcctacctagatggatagaggacccaagcgaaaaaggtatctcaagactaacggccggaatctggaggcccatgacccagaacccaggaaggatagaagcttgaagacctggggaaatcccaagatgagaaccctaaaccctacctcttttctattgtttacacttcttactcttagatatttccagttctcctgtttatctttaagcctgattcttttgagatgtactttttgatg

SEQ ID NO: 11891 - DNA, 562 bp, Homo sapiens; identical to SEQ ID NO: 3336

SEQ ID NO: 11892 - DNA, 507 bp, Homo sapiens; identical to SEQ ID NO: 3339
  misc_feature 352: n = A,T,C or G

SEQ ID NO: 11893 - DNA, 388 bp, Homo sapiens
atgtctcatctgtgctctccgtgttcctttcctttttttgatatatgaaaacctattctggtctaaattgtgttactagcctcaaaatacatcaaaaaataagttaatcaggaactgtacggaatatatttttaaaaatttttgtttggttatatcaaaatagttacaggcactaaagttagtaaagaaaagtttaccatctgaaaaagctggattttctttaagaggttgattataaagttttctaaatttatcagtacctaagtaagatgtagcgctttgaatatgaaatcataggtgaagacatgggtgaacttacttgcataccaagttgatacttgaataaccatctgaaagtggtacttgatcatttttaccattattttta

SEQ ID NO: 11894 - DNA, 408 bp, Homo sapiens
tcccgtctcagcctcccagtagctggaattacaggcatgcgccaccacgcccggcttatttcgtatttttagtagagacgggtttccgcatgttggtcaggctggtctggaactcctgacctcaagtgatccacctggctcagcttaccgaagtgctgagattccgggtgtgagccaccgcgcctagccctctaaacttttaaataatcgtgaaatgtatgcgcagctgaagcgaattcagctatttcctctaccttttgtgtggaatttaaaatactgaacttgtgagatgaacctggtgggcaccagttctcaaacttcttggtcacaggacgcttgcactctcttaaaatgtactgaggacacctaaaagcttttgctcactgttgtttactactgctatttact

SEQ ID NO: 11895 - DNA, 276 bp, Homo sapiens
ataaaatcctttcttcccatatgcttgtgacggattccccctccccagaatacttaaaatctgacagcgatttagagttttattgccatcttctcagaggcagcttgaacccaaaggaatttccaacttatgaatacataaaatttgtaggaaattttcgctcttacaacaatgtgcctagcccctcctgtaatggttttgacaacaccctttcaagaccttgccgggtgccactaggaaaggaggtttgcttcattgccaccgttcgtctggcaa

SEQ ID NO: 11896 - DNA, 561 bp, Homo sapiens; identical to SEQ ID NO: 576

SEQ ID NO: 11897 - DNA, 277 bp, Homo sapiens
gcgaactcatctttgccagtacaggagctcgtgccgtggcccacagcccacagcccacagccatgggctgggacctgacggtgaagatgctggcgggcaacgaattccaggtgtccctgagcagctccatgtcggtgtcagagctgaaggcgcagatcacccagaagatcggcgtgcacgccttccagcagcgtctggctgtccacccgagcggtgtggcgtgcaggacagggtcccccttgccagccagggcctgggccccggcagcacggtcctg

SEQ ID NO: 11898 - DNA, 269 bp, Homo sapiens
aggttgcgtcctttctcaaaaggaataagcatgggcctttcctcctctttgtttcctttctacacgttcacatccctcttatcactatggagaacttcctcgggaagagtctccacgggctgtatggggacaacgtagaggagatggactggatggtaggacggatccttgacactttggacgtggagggtttgagcaacagcaccctcatttattttacgtcggatcacggcggttccctagagaatcaacttggaaacaccagtatg

SEQ ID NO: 11899 - DNA, 358 bp, Homo sapiens
taagctcgggaattcggctcgaggctctggctcttccagcaaaccagcaggagctgactctacacacaaagtcccagtggtcatgctggagccaattcgaataaaacaagaaaacagtggaccaccggaaaattatgatttccctgttgttatagtgaagcaagaatcagatgaagaatctaggcctcaaaatgccaattatccaagaagcatactcacctccctgctcttaaatagcagtcagagctctacttctgaggagactgtgctaagatcagatgcccctgatagtacaggagatcaacctggacttcaccaggacaattcctcaaatggaaagtctgaatggttggatcct

SEQ ID NO: 11900 - DNA, 528 bp, Homo sapiens; identical to SEQ ID NO: 3360

SEQ ID NO: 11901 - DNA, 157 bp, Homo sapiens
tcactatatatatgaggaacctgaggtccaaagtggggaagtgtcttacccaaggtcacatggtttcatagaaattatgttgaatccaataagccttcccggacattccaagcctcttaaccatggcatctatgttgaggatgtcaatgtttatttc

SEQ ID NO: 11902 - DNA, 448 bp, Homo sapiens
gaaattaatttaaggtcttttcttaaaaaaaaaatccacctcattttcagttaacatgtgccattaaatagataacatcctgtggatttagggatattttccagccagaatggatccaaaaaaattgaatggtgcttaaattgagaaataataataaatatatctatatagaatagacatatcccactgtatattaattgaggttacagaaagttctttatataaaacttatttaaatttttcatatttcatctttgaaaaagtctgaaaaaaatccataatattttctggtatgaaagtttgacagtattaatattttttttatattttcttaaatcattaaaccattttaatatatgttaactactaataaatggtttattctttctaactccatataagcttttccagcaaagattgtaataacacatttatgttctcgtttttc

SEQ ID NO: 11903 - DNA, 485 bp, Homo sapiens; identical to SEQ ID NO: 3361
  misc_feature 84: n = A,T,C or G

SEQ ID NO: 11904 - DNA, 591 bp, Homo sapiens
  misc_feature 52: n = A,T,C or G
cgaattcgcactcttttttagttatccccacctgcccacttcccttattagnggcgaaatattttaaccaaattatctgcttccctgactattcctggagtacagctacatctcattgctgcccttcttcccaatccaaagcctcctttgtgtcctctaacatccccacaatatcaccccttaccacaagacctcccttcagcttaatctctcccactctaggttcccacgccgcccctaatcccacttgaagcagccctgagaaacatcgcccattctctctccataccaccccccaaaaattttcgccgctccaacacttcaacactattttgttttatttgtcttattaatatcagaaggcaggaatgtcaggcctctgagcccaggccaggccatcgcatcccctgtgacttgcacatatacatccagatggcctgaagtaactgaagatccacaaaagaagtaaaaacagccttaactgatgacattccaccattgtgatttgttcctgccccaccctaactgatcaatgtactttgtaatctcccccacccttaagaaggttctttgtaattctccccacccttg

SEQ ID NO: 11905 - DNA, 637 bp, Homo sapiens
tgaattcgaacccactatgatccccctcgaaagctcatggctatgcagcggccaggtccctatgataggccgggggctggcagagggtataatagcattggcagaggagctgggtttgaaaggatgaggcgtggtgcctatggtggagggtatggaggctatgatgactatggtggctataatgatggatatggctttgggtctgatagatttggaagagacctcaattactgtttttcaggaatgtctgatcatagatacggagatggtgggtccagtttccagagcaccacagggcactgtgtacacatgagggggttaccttacagagccactgagaatgatatttataatttcttctcacctcttaatcccatgagagtacatattgaaattggacccgatggcagagttaccggtgaggcagatgttgaatttgctactcatgaagatgctgtggcagctatggcaaaagacaaagctaatatgcaacacagatatgtggagctcttcttaaattctactgcaggaacaagtgggggtgcttacgatcacagctatgtagaactttttttgaattctacagcaggggcaagtggtggcgcttatggtagccaaatgatgggagggatgggct

SEQ ID NO: 11906 - DNA, 486 bp, Homo sapiens
tcgagctcttggcactgggggcgtcaggctgtcggatgttccttccttccataccccagcataccttctccttgcttagagtgcaggggtctgagacagcagccactggggttgaggagggggaggagacccctgagacccagaggtgccccttcctcagctgggagtgggccgcctcatgctctgctggggcctggcatggaacgtgagacctgtaagctgtcccgcgggccccggcaccccgcccagctgtgcactttgctcactcgctctgccatggtgccatgactgtactgtgcccatgcgtgacctggactgtggaccctctgctgctccgcctctcccctccccactggctctgtctgctctcctgccaccctgctggccgggagcccctccccggggagttcttggtgaagtccttcccgggcctccttgtgtttttgcctcattcctactgtcacacaggtcacgagggtggactcc

SEQ ID NO: 11907 - DNA, 554 bp, Homo sapiens
agctcggaattcggctcgagcctgcaccccgacctctggcagatcttcgacaaccccgtcgactggaaggagcagtacatccacgagaactacagccgggccctggaaggggaaggaatcgtggagcagccatgcccggacgtgtactggttcccactgctgtcagaacaaatgtgtgatgagctggtggcagagatggagcactacggccagtggtcaggcggccggcatgaggattcaaggctggctggaggctacgagaatgtgcccaccgtggacatccacatgaagcaggtggggtacgaggaccagtggctgcagctgctgcggacgtatgtgggccccatgaccgagagcctgtttcccggttaccacaccaaggcgcgggcggtgatgaactttgtggttcgctaccggccagacgagcagccgtctctgcggccacaccacgactcatccaccttcaccctcaacgttgccctcaaccacaagggcctggactatgagggaggtggctgccgcttcctgcgctacgactgtgtgatctcctcccc

SEQ ID NO: 11908 - DNA, 645 bp, Homo sapiens
aagctcggaattcggctcgaggaccttgggaacccttggtgtctggaacaaattattccctgggcctccgatttgcagttccacgtcttgagaaaacaaacatgagcattaacttcgatctccaaatcagaagttccaacaaggacaatccagacagcaattttgtgagcctgcaaatcaacatcactgctgtagcgcaggtggaaataagaggagtgtcacaccctccgcagattgttctgcccattcataactgggaaccagaagaggagccccacaaagaggaggaggttggaccattggtggaacatatttatgagctgcacaatattggaccaagtaccatcagtgacaccatcctggaggtgggctggcctttctctgcccgggatgaatttcttctctatattttccatattcaaactctgggacctctgcagtgccaaccaaatcctaatatcaatccacaggatataaagcctgctgcctccccagaggacacccctgagctcagcgcctttttgcgaaactctactattcctcatcttgtcaggaagagggatgtacatgtggtcgaattccacagacagagccctgcaaaaatactgaattgtacaaatatcgagtgtttacaaatctctgtgc

SEQ ID NO: 11909 - DNA, 194 bp, Homo sapiens; identical to SEQ ID NO: 593

SEQ ID NO: 11910 - DNA, 514 bp, Homo sapiens
ttcaaacagcagccctcagagcagttggcaacatagtgactggcaccgacgagcagacccaggttgttctcaattgtgatgtcctgtcacacttcccaaatctcttatcacacccaaaagagaagataaataaggaagcagtgtggttcctttccaacataacagcaggcaaccagcaacaagttcaagctgtaatagatgctggattaattcctatgataattcatcagcttgctaagggggactttggaacacaaaaagaagctgcttgggcaatcagcaacttaacaataagtggcagaaaagatcaggttgagtaccttgtacagcagaatgtaataccaccgttctgtaatttactgtcagtgaaagattctcaagtggttcaggtggttctagatggtctaaaaaacattctgataatggccggtgatgaagcaagcacaatagctgaaataatagaggaatgtggaggtttggagaaaattgaagttttacagcaacatgaaaatga

SEQ ID NO: 11911 - DNA, 559 bp, Homo sapiens; identical to SEQ ID NO: 3377

SEQ ID NO: 11912 - DNA, 602 bp, Homo sapiens
cagggtggcgactctatagactctaggacataaattagaggtctccaaaatcggatctggggctctgggatagctgacccagccccttgagaaaccttattgtacctctcttatagaatatttattacctctgatacctcaacccccatttctatttatttactgagcttctctgtgaacgatttagaaagaagcccaatattataatttttttcaatatttattattttcacctgtttttaagctgtttccatagggtgacacactatggtatttgagtgttttaagataaattataagttacataagggaggaaaaaaaatgttctttggggagccaacagaagcttccattccaagcctgaccacgctttctagctgttgagctgttttccctgacctccctctaatttatcttgtctctgggcttggggcttcctaactgctacaaatactcttaggaagagaaaccagggagcccctttgatgattaattcaccttccagtgtctcggagggattcccctaacctcattccccaaccacttcattcttgaaagctgtggccagcttgttatttataacaacctaaatttggttctag

SEQ ID NO: 11913 - DNA, 477 bp, Homo sapiens
tgatgatgacttcttaggggaatgtgaatgtacccttggacaaattgtttccagcaagaagctaactcgaccactggtgatgaaaactggcagacctgcaggaaaagggagcattacgatttcagctgaagaaataaaagataatagagtggtcttgtttgaaatggaagccagaaaactggataataaggatctatttggaaagtcagacccatacctggaattccacaagcagacatctgatggaaactggctaatggttcatcggacagaggttgttaaaaacaacttgaatcctgtttggaggcctttcaagatctctcttaactcactgtgttacggagatatggacaaaaccattaaggtggagtgttatgattatgacaatgatgggtcacatgatctcattggaacatttcagaccaccatgacaaaactgaaagaagcctccagaagctcacctgttgaatttgaatg

SEQ ID NO: 11914 - DNA, 1599 bp, Homo sapiens
aattccggcggaagtggtggaggaacttccggcagcggcagctcaagtggccaaggcaagatgggtcaaagtcagagtggtggtcatggtcctggaggtggcaagaaggatgacgaggacaagaaaaagaaatatgaacctcctgtaccaactagagtggggaaaaagaagaagaaaacaaagggaccagatgctgccagcaaactgccactggtgacacctcacactcagtgccggttaaaattactgaagttagagagaattaaagactatcttctcatggaggaagaattcattagaaatcaggaacaaatgaaaccattagaagaaaagcaagaggaggaaagatcaaaagtggatgatctgagggggaccccgatgtcagtaggaaccttggaagagattattgatgacaatcatgccatcgtgtctacatctgtgggctcagaacactacgtcagcattctttcatttgtagacaaggatctgctggaacctggctgctcggtcctgctcaaccacaaggtgcatgccgtgataggggtgctgatggatgacacggatcccctggtcacagtgatgaaggtagaaaaggccccccaggagacctatgcagatattggggggttggacaaccaaattcaggaaattaaggaatctgtggagcttcctctcacccatcctgaatattatgaagagatgggtataaagcctcctaagggggtcattctctatggtccacctggcacaggtaaaaccttgttagccaaagcagtagcaaaccaaacctcagccactttcttgagagtggttggctctgaacttattcagaagtacctaggtgatgggcccaaactcgtacgggaattgttccgagttgctgaagaacatgcaccgtccatcgtgtttattgatgaaattgacgccattgggacaaaaagatatgactccaattctggtggtgagagagaaattcagcgaacaatgttggaactgctgaaccagttggatggatttgattctaggggagatgtgaaagttatcatggccacaaaccgaatagaaactttggatccagcacttatcagaccaggccgcattgacaggaagattgagttccccctgcctgatgaaaagacgaagaagcgcatctttcagattcacacaagcaggatgacgctggctgatgatgtaaccctggacgacctgatcatggctaaagatgacctctctggtgctgacatcaaggcaatctgtacagaagctggtctgatggccttaagagaacgtagaatgaaagtaacaaatgaagacttcaaaaaatctaaagaaaatgttctttataagaaacaggaaggcacccctgaggggctgtatctctaatgaaccatggctgtcatcaggaaaatggttgggagatttctcaatccctgaaagggatgaggttgggggagttgcccagaggaatccctgttcccactgatttttattagcaaaacatcctgtgtcttttggagtacgatgtgtaagtgcccattgggtggcctgttggtcactgtgcagcagtctgcttcccaataaagcgtgctctttcacaag

SEQ ID NO: 11915 - DNA, 92 bp, Homo sapiens
catggcacagccaggactgccaccagtaccaggagcaccaggaatgcctccaggcatacctccattaatgccaggtgttcctcctctgatgc

SEQ ID NO: 11916 - DNA, 502 bp, Homo sapiens
tggtggcaggagatgagtggcttttcgagggacctggcacgtacatcccccggaaggaagtggaggtcgtggagatcattcaggccaccatcatcaggcagaaccaggctctgcggctcagggcccgcaaggagtgctgggaccgggacggcaaggagagggtgacaggggaagaatggctggtcaccacagtaggggcgtacctcccagcggtgtttgaggaggttctggatttggtggacgccgtcatccttacggaaaagacagccctgcacctccgggctcggcggaacttccgggacttcaggggagtgtcccgccgcactggggaggagtggctggtaacagtgcaggacacagaggcccacgtgccagatgtccacgaggaggtgctgggggttgtgcccatcaccaccctgggcccccacaactactgcgtgattctcgaccctgtcggaccggatggcaagaatcagctggggcagaagcgcgtggtcaaggg

SEQ ID NO: 11917 - DNA, 259 bp, Homo sapiens
gtcccggacaggcgtggaggtggggcgcaggcgaggatgaagcttgagttggccaggagtcggaaaacgattgcaggcgggaccgcgtccgtcggggctgaggaaacttagcgtggcagaccctaaactgggataactttagggatatggccttcttttcccagttgcctcaaacttagagcagcgtcgtctttagccgaagattcattttcccagcattttccttctccaggcggagtagttggagacagagggcaag

SEQ ID NO: 11918 - DNA, 254 bp, Homo sapiens; identical to SEQ ID NO: 3399

SEQ ID NO: 11919 - DNA, 468 bp, Homo sapiens; identical to SEQ ID NO: 623

SEQ ID NO: 11920 - DNA, 481 bp, Homo sapiens
ttaacaccttaagagttgtagttactgaccagaaatatggacagacttcttagacttggaggaggtatgcctggactgggccaggggccacctacagatgctcctgcagtggacacagcagaacaagtctatatctcttccctggcactgttaaaaatgttaaaacatggccgtgctggagttccaatggaagttatgggtttgatgcttggagaatttgttgatgattataccgtcagagtgattgatgtgtttgctatgccacagtcaggaacaggtgtcagtgtggaggcagttgatccagtgttccaagctaaaatgttggatatgttgaagcagacaggaaggccggagatggttgttggttggtatcacagtcaccctggctttggttgttggctttctggtgtggatatcaacactcagcagagctttgaagccttgtcggagagagctgtggcagtggttgtggatcccattc

SEQ ID NO: 11921 - DNA, 435 bp, Homo sapiens; identical to SEQ ID NO: 3403

SEQ ID NO: 11922 - DNA, 543 bp, Homo sapiens; identical to SEQ ID NO: 627

SEQ ID NO: 11923 - DNA, 587 bp, Homo sapiens
taagctcggaattcgaattccgtggttttgtctgctgcgcccgctcttcgcgctctcgtttcattttctgcagcgcgccagcaggatggcccacaagcagatctactactcggacaagtacttcgacgaacactacgagtaccggcatgttatgttacccagagaactttccaaacaagtacctaaaactcatctgatgtctgaagaggagtggaggagacttggtgtccaacagagtctaggctgggttcattacatgattcatgagccagaaccacatattcttctctttagacgacctcttccaaaagatcaacaaaaatgaagtttatctggggatcgtcaaatctttttcaaatttaatgtatatgtgtatataaggtagtattcagtgaatacttgagaaatgtacaaatctttcatccatacctgtgcatgagctgtattcttcacagcaacagagctcagttaaatgcaactgcaagtaggttactgtaagatgtttaagataaaagttcttccagtcagtttttctcttaagtgcctgtttgagtttactgaaacagtttacttttgttcaataaagt

SEQ ID NO: 11924 - DNA, 532 bp, Homo sapiens
gtctacagaaacatgctttgcacttctgggaggacatccttgttttcttaccacacaagatattcatttgggtgtgaatgaaagtctcacggacacggcccgtgtattgtctagcatggcagatgcagtattggctcgagtgtataaacaatcagatttggacaccctggctaaagaagcatccatcccaattatcaatgggctgtcagatttgtaccatcctatccagatcctggctgattacctcacgctccaggaacactatagctctctgaaaggtcttaccctcagctggatcggggatgggaacaatatcctgcactccatcatgatgagcgcagcgaaattcggaatgcaccttcaggcaactactccaaagggttatgagccggatgctagtgtaaccaagttggcagagcagtatgccaaagagaatggtaccaagctgttgctgacaaatgatccattggaagcagcgcatggaggcaatgtattaattacagacacttggataagcatgggacaagaagag

SEQ ID NO: 11925 - DNA, 391 bp, Homo sapiens
acagcgggcatatactgtgtaggagacgaggtgaccatggctgatctgtgcttggtgcctcaggtggcaaatgctgaaagattcaaggtggatctcaccccctaccctaccatcagctccatcaacaagaggctgctggtcttggaggccttccaggtgtctcacccctgccggcagccagatacacccactgagctgagggcctagctcccaaatcctgccccgttggcacagggccacaggagcagaagctgggtgggctgaagaggcctggaaacgagagtcttaattgaggagatgggagactcgaactctagccctggatctgccttcctgctgaaacttgttccacctcagtcccctcatctgtcacacgcatgtggggtggagt

SEQ ID NO: 11926 - DNA, 416 bp, Homo sapiens
tgaaacctcgtgcctggctcgtctgccacctacatttctctttccagctgctgttttgtaaaaagaaaaagaaaaaagaagcccaaactagtgagagtaatatctaattatctcattttttgtaggtctgtgataaagaacttagtcatcccttccacctcctactgtgaagaacagaccctgggtcccacactgaaatcccctctagtcacccattcccaccccccagggagctgcctcccaggcagggggtgcagaaaatgattgatgggctggggaaccctggagagcctcgactccggaagtctcaaggtgcctcctcctctccttagctggcccgttggttttctgagcagggggctgaactgtgaacaagtcagacaaataaagcaagggtctgcaccatctgcaatgtc

SEQ ID NO: 11927 - DNA, 496 bp, Homo sapiens
ggataccccttccgtgcctgggcttcacccctgaacatcagcgagacttcattgcccgtgacctaggtcctaccctcgccaacagtactcaccacaatgtccgcctactcatgctggatgaccaacgcttgctgctgccccactgggcaaaggtggtactgacagacccagaagcagctaaatatgttcatggcattgctgtacattggtacctggactttctggctccagccaaagccaccctaggggagacacaccgcctgttccccaacaccatgctctttgcctcagaggcctgtgtgggctccaagttctgggagcagagtgtgcggctaggctcctgggatcgagggatgcagtacagccacagcatcatcacgaacctcctgtaccatgtggtcggctggaccgactggaaccttgccctgaaccccgaaggaggacccaattgggtgcgtaactttgtcgacagtcccatcattgtagacatcaccaa

SEQ ID NO: 11928 - DNA, 302 bp, Homo sapiens
tctaacatgacagaaagtctttgaaaatgattcttaaatgctccttaaaagacacatctgacatttttaacaacttactaaaagttgaaatgaccattctgtgtagccataaaagaaacacactgaagtgtatggcctctggagttagtcttaggaaaacttattgctctgtgtcaatgttaacctgtctcagatcaagtaattctttcactaggttgggtttggggaggggggaaaagaggggctcttcctaggagaacgataagaaatggaaagactccttgaagtgttgcaagggaacc

SEQ ID NO: 11929 - DNA, 251 bp, Homo sapiens
tttggccaacgtgacagggctttgtttggtggtaaaaagggttactagacacccctcattccactgccactggagggcgcatttctcagctcttgctcttcaaacctgctgaaaggaattcctagatctaaacaccagtttccttcatgtccttatcgcttcctgtccaaatctactgaaaaccccttcggctgttacttctggatgtgatgtcgcagtctttagcccatcctgtctgctagtgccatctg

SEQ ID NO: 11930 - DNA, 209 bp, Homo sapiens
agagcttatatgtaattgcctgctgtcagtgaatcttgggtttaaggcccattagaaaaatagcaggctttagtagagtggttttttccagtgagtacttttcagtcaacaggtttattgggaggtggctaaaatgcacatggaggtgagcccttccctgccagacaagcaaagaatcaagctgtatatttaaaacttggctgttaacc

SEQ ID NO: 11931 - DNA, 464 bp, Homo sapiens
taagctcgggaattcggctcgagcttattaaaactttcccaattaattttaactgtgttattgaatttacttttactaaactactgttctctttgtctcttttttaactaggctctgattttgacccctaatttaagctttaagaatagaaatcagctaatatagaatcagacaaaaaggggattaaatgagcagtttgagttacattattttattgtattaaatttatttgatttatattgtcatgttctcttgccagagagaatctgtaggaaaatactgtatcttgtatactgatcattggctttttctagaaaaactgtctctgattctggacaaagctcagttatagttacgagaaagatatggtacagggaggaaaatactgcctttttttttttttaaaaaaatttttaaaacaaaaaaaaagggcaaaaagggggtttaaggggttttttttaaaa

SEQ ID NO: 11932 - DNA, 516 bp, Homo sapiens; identical to SEQ ID NO: 3419

SEQ ID NO: 11933 - DNA, 507 bp, Homo sapiens; identical to SEQ ID NO: 645

SEQ ID NO: 11934 - DNA, 567 bp, Homo sapiens; identical to SEQ ID NO: 3429

SEQ ID NO: 11935 - DNA, 554 bp, Homo sapiens
atttaaaagggacgcgaataagtttgctccttcatataagtaattattctatataggaccattatgtttggatcattaaatacctatatgaatatgagatctgaagcacgtcaagttgaaattaggtacagctgttgctccttagcaggctatgaagttgcaatgcttcacatctcttcactacttaaagtgctatttcttgcattcatttctcttgcaataaagcttcatttttttttccccttgagagtatatattttcccctacggttttaaaaaacagataaaacatggacaatggcagaggacttttttggtcttttagtattgaacatgaaatttgtatttaacactgtatcatttatcaggattcattgatcaaatatttcaacctttcatatttttaagaaaacacccatatatattgaaatgcaaacttaaacatattctgttcacttgagtgtaatacttgatgcatgcacacacacacacacataccttctttatagctacaaagtcagggcgttcataggcaaaatctgacaagactgaaac

SEQ ID NO: 11936 - DNA, 217 bp, Homo sapiens
tacaaatttttaaaaatcacaaattggtatccatgtataattcatttccgtgcattttcttgtgtgaagaaagctcagtaaaagtatttcttaggtttctgtaattctagttctctactcgattttcttctgcaattttctgagccagaacccttcttagaaggcatattagagactttaaaagttaaataataaaataaatctcttctttaaacag

SEQ ID NO: 11937 - DNA, 640 bp, Homo sapiens
tttgaaaaggcctctgtggagtaccaggaacacctgtgtgccatgacaggtgttgattgctgcatctccagctttgacaaatcggtgctcaccttagccagtgctgggtgtaagagtgccagcctgaaacattgtctgaatggtgaatccagaaaaagtgtgctgtccaaaccgactgactcttcccctgaggttataaattatttaggaaacaaagcatgtgagtgctacatctcaactgccgattgggctgctgtgcaggaatggcagaacgctatccatgacttgaaaaagagtaccagtagcacttccctcaacctgaaagctgacttcaactatataaaatcattaagcagctttgagtctggaaaatttgtcgaatgtaccgagcaattagaattgttaccaggagaaaatatcaatctacttgctggaggatcaaaagaaaaaatagacatgaaaaaactgcttcgtaacatgtgaagtccagatccaagggaacctcagaaatccattgaagttccattgttaagaagttctgtttgtttggcaactgctttaaacccgatagaacaagatcagaagtggcagtctataactgaaaatgtggtaaagtacttgaagcaacatcccgcatcgc

SEQ ID NO: 11938 - DNA, 502 bp, Homo sapiens; identical to SEQ ID NO: 3440

SEQ ID NO: 11939 - DNA, 165 bp, Homo sapiens
tcagtggctttgctaccctgtgtgctctgaaagcacaggacgagtcttgtttgctcctgaatcctcatctgtcagggctggtcaggcacatagatgctacatggttagtaaatatttgtgcaatataaaggttggacttctttgttactatcattacagcttctt

SEQ ID NO: 11940 - DNA, 343 bp, Homo sapiens
gaatactcacaccacaagaaggacaaacttgtgcacatgtccaagaaagaaagcttcttgattgaggtagcatgaaggatgaggcttcagcccccattgtcttatgtagaatgtggcaatgccaactggagaaagggaagaaggacatattaccttggtttgaatccctgagttctgtactgttctgttttgtttagtctagccacagttcttcacaaaggaaaaaaaaatgtgtagatgataccatgacttttgttaaagccatgacttttgtttgcttggcaaacaaaccctttttttaaaactttgatatttttttttttaaaaattttttttccctttc

SEQ ID NO: 11941 - DNA, 243 bp, Homo sapiens
atcagacatacacacattagatagataaatttagaggacaaaataaggaacatgaaaagcaaatagtagatggcaaatgtaatataatatactatgcataaattttaacaacacacaatattatattgcatattgcccaataagcagaagccataaggtctcacacttttcttataatgcaatagaataaaaatgacaacaaagtaaaagggtatcccaaaaataaaactatccttttggaaa

SEQ ID NO: 11942 - DNA, 605 bp, Homo sapiens
cgagcaaacgtccagcctgggacttaaagggtcagttatgtgacctaaatgcagaactaaaacggtgccgtgagaggactcaaacgttggaccaagagaaccagcagcttcaggaccagctcagagatgcccagcagcaggtcaaggccctggggacagagcgcacaacactggaggggcatttagccaaggtacaggcccaggctgagcagggccaacaggagctgaagaacttgcgtgcttgtgtcctggagctggaagagcggctgagcacgcaggagggcttggtgcaagagcttcagaaaaaacaggtggaattgcaggaagaacggaggggactgatgtcccaactagaggagaaggagaggaggctgcagacatcagaagcagccctgtcaagcagccaagcagaggtggcatctctgcggcaggagactgtggcccaggcagccttactgactgagcgggaagaacgtcttcatgggctagaaatggagcgccggcgactgcacaaccagctgcaggaactcaagggcaacatccgtgtattctgccgggtccgccctgtcctgccgggggagcccactccaccccctggcctcctc

SEQ ID NO: 11943 - DNA, 340 bp, Homo sapiens
ccctggccattagccctgacgccaaagtctgcttctcctgctgcagcgatgggaacattgctgtctgggacctgcacaaccagaccctggtcaggcagttccagggccacacagatggggccagctgcatagacatctcccatgatggcaccaaactgtggacagggggcctggacaacacagtgcgctcctgggacctgcgggagggccgacagctacagcagcatgacttcacttcccagatcttctcgctgggctactgccccactggggagtggctggctgtgggcatggagagcagcaacgtggaggtgctgcaccacaccaagcctgacaagta

SEQ ID NO: 11944 - DNA, 626 bp, Homo sapiens
tgcaggtcctggtgcttgatggtcgaggccatctcctgggccgcctggcggccatcgtggctaaacaggtactgctgggccggaaggtggtggtcgtacgctgtgaaggcatcaacatttctggcaatttctacagaaacaagttgaagtacctggctttcctccgcaagcggatgaacaccaacccttcccgaggcccctaccacttccgggcccccagccgcatcttctggcggaccgtgcgaggtatgctgccccacaaaaccaagcgaggccaggccgctctggaccgtctcaaggtgtttgacggcatcccaccgccctacgacaagaaaaagcggatggtggttcctgctgccctcaaggtcgtgcgtctgaagcctacaagaaagtttgcctatctggggcgcctggctcacgaggttggctggaagtaccaggcagtgacagccaccctggaggagaagaggaaagagaaagccaagatccactaccggaagaagaaacagctcatgaggctacggaaacaggccgagaagaacgtggagaagaaaattgacaaatacacagaggtcctcaagacccacggactcctggtctgagcccaataaagactgttaattcct

SEQ ID NO: 11945 - DNA, 628 bp, Homo sapiens
ctctcaaaggcctttgtgggccagaagagttccttcctggtggactgcagcaaagctggctccaacatgctgctgatcggggtccatgggcccaccaccccctgcgaggaggtctccatgaagcatgtaggcaaccagcaatacaacgtcacatacgtcgtcaaggagaggggcgattatgtgctggctgtgaagtggggggaggaacacatccctggcagcccttttcatgtcacagtgccttaaaacagttttctcaaatcctggagagagttcttgtggttgcttttgttgcttgtttgtaattcattttatacaaagccctccagcctgtttgtggggctgaaaccccatccctaaaatattgctgttgtaaaatgccttcagaaataagtcctagactggactcttgagggacatattggagaatcttaagaaatgcaagcttgttcagggggctgagaagatcctgagtacactaggtgcaaaccagaactcttggtggaacagaccagccactgcagcagacagaccaggaacacaatgagactgacatttcaaaaaaacaaaactggctagcctgagctgctggttcactcttcagcatttatgaaacaaggctagggga

SEQ ID NO: 11946 - DNA, 388 bp, Homo sapiens; identical to SEQ ID NO: 328

SEQ ID NO: 11947 - DNA, 480 bp, Homo sapiens
tcgaattcttctgatcataatttgtttagtgctacatttgataatttattatttacagcttagaatattgatttcttgaatacgtataagcacatttgactgtcttttatatatggattactgcattccattgattcttattttgtggttggctttatttctttcacaactgtgtaagtttaaagagctaaagctctaaaactgttctgagaaacaatgaatagtacatgtatatgtatatttttaaactgccttattgctcaatgagttgctgttcctggagtatctaactttcagtttactcaaaaacttttgggtaaataaaaaagggaagtacagatagtttaggttgtgcatggttgcatgaattttgaagtcatttctatgtggagcattatttttcttcttgttaaatatagaaaaaaaaagagattctagtacaaagttactgtttaacaaaagcaacataaactctgggaa

SEQ ID NO: 11948 - DNA, 1418 bp, Homo sapiens
cttttcctgtggcagcagccgggctgagaggagcgtggctgtctcctctctccgccatggcgtgtgctcgcccactgatatcggtgtactccgaaaagggggagtcatctggcaaaaatgtcactttgcctgctgtattcaaggctcctattcgaccagatattgtgaactttgttcacaccaacttgcgcaaaaacaacagacagccctatgctgtcagtgaattagcaggtcatcagactagtgctgagtcttggggtactggcagagctgtggctcgaattcccagagttcgaggtggtgggactcaccgctctggccagggtgcttttggaaacatgtgtcgtggaggccgaatgtttgcaccaaccaaaacctggcgccgttggcatcgtagagtgaacacaacccaaaaacgatacgccatctgttctgccctggctgcctcagccctaccagcactggtcatgtctaaaggtcatcgtattgaggaagttcctgaacttcctttggtagttgaagataaagttgaaggctacaagaagaccaaggaagctgttttgctccttaagaaacttaaagcctggaatgatatcaaaaaggtctatgcctctcagcgaatgagagctggcaaaggcaaaatgagaaaccgtcgccgtatccagcgcaggggcccgtgcatcatctataatgaggataatggtatcatcaaggccttcagaaacatccctggaattactctgcttaatgtaagcaagctgaacattttgaagcttgctcctggtgggcatgtgggacgtttctgcatttggactgaaagtgctttccggaagttagatgaattgtacggcacttggcgtaaagccgcttccctcaagagtaactacaatcttcccatgcacaagatgattaatacagatcttagcagaatcttgaaaagcccagagatccaaagagcccttcgagcaccacgcaagaagatccatcgcagagtcctaaagaagaacccactgaaaaacttgagaatcatgttgaagctaaacccatatgcaaagaccatgcgccggaacaccattcttcgccaggccaggaatcacaagctccgggtggataaggcagctgctgcagcagcggcactacaagccaaatcagatgagaaggcggcggttgcaggcaagaagcctgtggtaggtaagaaaggaaagaaggctgctgttggtgttaagaagcagaagaagcctctggtgggaaaaaaggcagcagctaccaagaaaccagcccctgaaaagaagcctgcagagaagaaacctactacagaggagaagaagcctgctgcataaactcttaaatttgattattccataaaggtcaaatcattttggacagcttcttttgaataaagacctgattatacaggc

SEQ ID NO: 11949 - DNA, 175 bp, Homo sapiens
atattagccaacaatgttttaatatactttatagacaataagtttttttacaatattttatttactcatctaccaataaaacttttctaggaattcaacaataaaccaacattaaaagctttctagcataaatcaccaatttccaagataaccacaggccatctttaaaatacat

SEQ ID NO: 11950 - DNA, 399 bp, Homo sapiens
agctgatgaagatgatgtggacaatgaggaggctgcactgctgcatgaagaggctaccatgactattgaagagctgctgacacgctacgggcagaactgtcacaagggccctccccacagcaaatctggaggtgggacaggcgaggaaccagggtcccagggcctcaatggggaggcaggacctgaggactcaactagggaaactccttcacaagaaaatggccccacagccaaggcctacacaggcttttcctccaactcggaacgtgggactgaggcaggccaagttggtgagcctggcattcccactggtgaggctgggccttcctgctcttcagcctctgacaagctgcctcgagttgctaagtccaagttctttgaggacagtgaggatgagtc

SEQ ID NO: 11951 - DNA, 559 bp, Homo sapiens; identical to SEQ ID NO: 3462

SEQ ID NO: 11952 - DNA, 368 bp, Homo sapiens
catgctctacgtggtggggaagggagatggcaacatccgctactacgaggtgagcgccgacaagcctcacctgagctacctgactgagtaccgctcctataacccacagaaggggatcggtgtcatgccaaagagaggactcgacgtgtcctcctgcgagatcttccgcttctacaagctgatcacaaccaaaagcctcatcgagcccatctccatgattgtgccccggcggtcagaatcctaccaagaggacatataccctccaacagcaggggcccagccctccctgacggcccaggagtggctcagcgggatgaatcgagacccaatcctggtgtcccttaggcctggctctgaactgctgagac

SEQ ID NO: 11953 - DNA, 525 bp, Homo sapiens; identical to SEQ ID NO: 3465

SEQ ID NO: 11954 - DNA, 480 bp, Homo sapiens; identical to SEQ ID NO: 3472

SEQ ID NO: 11955 - DNA, 485 bp, Homo sapiens
ggtggccagccattgtggtgccgccccagcttctggatacagccttttgggtaaacactgggaactccagaagttgtggggagagtggggaatcagacagccgcctctaggggctgggttctgctggggcctccttgttggtgctgtaggcacccgccagggagcagggacccgacttgcagacgcattgcccggtactaggaaggagtgaggtgtgttcccaccgtacacttcccacacgagctgcggctgccagcctcgggccatcagcctaggagagcagatgcagctccaggggctcgacttatagccagttacagctccccggctcttctgtgtggcagagcgtcgtttccgggccctcagggctggggagctcagttcccattgcttgtgctcagggctgagtcttaaagaagggtttgccggccctaacgctgcagcgcgtgcgcggtgagaggccctttttgagcctgtttactcct

SEQ ID NO: 11956 - DNA, 234 bp, Homo sapiens; identical to SEQ ID NO: 25
  misc_feature 146: n = A,T,C or G

SEQ ID NO: 11957 - DNA, 348 bp, Homo sapiens
tttataccctggacccaaagggaggagaagaacttgaacagaaatgcagttaggggtttggattactgccttgtgactaataaataggactagacactttcatccccacatataagacagtcagctcacagagaaaaatgacaaggtgggtctgcaaacaacggaagcactggcgcaccaaaacttgatctacagagccatctgaaactataaacaaatatgctgatgaatattaagaagatgaaagaaagaaaccaaaggtttaaaaatatgatgctgaaaacaatgaaatgtctctaggtaattaaacagtatggcaggtaatctaatttaaaactaaaacccagc

SEQ ID NO: 11958 - DNA, 541 bp, Homo sapiens
tccctattagctaaaagcccattaagacaagaaacacagaagcccctggtcccagagaagaagcaaagggccaggtagaggccagaagggagtctttggatcctgtccaggagcctgggggccaggcagaggctgatggagatgttccagggcccagaggggaagctgagggccaggcagaggctaaaggagatgcccctgggcccagaggggaagctgggggccaggcagaggctgaaggagatgcccccgggcccagaggggaagctgggggccaggcagaggccagggagaatggagaggaggccaaggaacttccaggggaaacactggagtctaagaacacccaaaatgactttgaggtgcacattgttcaagtggagaatgatgagatctagatcttgaagatacaggtaccccacgaagtctcagtgccagaacataagccctgaagtgggcaggggaaatgtacgctgggacaaggaccatctctgtgccccctgcctggtcccagtaggtatcaggtctttctgtgcagctc

SEQ ID NO: 11959 - DNA, 534 bp, Homo sapiens
ccaccctggtggccctgctggccgctcggaccaaagtgatccatcggctgcaggcagcgtccccagagctcacacaggccgctatcatggagaagctggtggcttactcatccgatcaggcacactcctcagtggaaagagctgggttaattggtggagtgaaattaaaagccatcccctcagatggcaacttcgccatgcgtgcgtctgccctgcaggaagccctggagagagacaaagcggctggcctgattcctttctttatggttgccaccctggggaccacaacatgctgctcctttgacaatctcttagaagtcggtcctatctgcaacaaggaagacatatggctgcacgttgatgcagcctacgcaggcagtgcattcatctgccctgagttccggcaccttctgaatggagtggagtttgcagattcattcaactttaatccccacaaatggctattggtgaattttgactgttctgccatgtgggtgaaaaagagaacagacttaacgggagcctttagactgg

SEQ ID NO: 11960 - DNA, 344 bp, Homo sapiens
atggaggcttcacaaccaggtgaaggctcgggaggcgagtctgctggaggtggagacaaagtctctgaaactggaacattcctgatctctccccacacagaggccagcagacctcttcctgaggacttctgtttaaaggaggacgaggaggaggttggtgacagtcaggcctgggaggagcccacaaactggagcacagagacatggaacctagctacttcctgggaggtggggcggggactacggagaaggtgcagccaggctgtggcaaagggccccagtcacagccttggctgggaaggagggacgacagctgaaggtcgactaaaacaaagtctgttttc

SEQ ID NO: 11961 - DNA, 480 bp, Homo sapiens
  misc_feature 441: n = A,T,C or G
catcccgtgggtgctggctgccaagtcttcgaaggccgacccaagctggccacatggcggcagcgcgtggaggcagcagtgggggaggacctcttccaggaggcccatgaggtcattctgaaggccaaggacttcccacctgcagaccccaccataaagcagaagctgatgccctgggtgctggccatgatccggtgagctgggaaacctcacccttgcaccgtcctcagcagtccacaaagcattttcatttctaatggcccatgggagccaggcccagaaagcaggaatggcttgcttaagacttgcccaagtcccagagcacctcacctcccgaagccaccatccccaccctgtcttccacagccgcctgaaagccacaatgagaatgatgcacactgaggccttgtgtcctttaatcactgcatttcattttgattntggataataaacctgggctcagcctgagcctctgcttct

SEQ ID NO: 11962 - DNA, 506 bp, Homo sapiens
agctgtctgacatcgctcaccgcatcgtggcacctggcaagggcatcctggctgcagatgagtccactgggagcattgccaagcggctgcagtccattggcaccgagaacaccgaggagaaccggcgcttctaccgccagctgctgctgacagctgacgaccgcgtgaacccctgcattgggggtgtcatcctcttccatgagacactctaccagaaggcggatgatgggcgtcccttcccccaagttatcaaatccaagggcggtgttgtgggcatcaaggtagacaagggcgtggtccccctggcagggacaaatggcgagactaccacccaagggttggatgggctgtctgagcgctgtgcccagtacaagaaggacggagctgacttcgccaagtggcgttgtgtgctgaagattggggaacacaccccctcagccctcgccatcatggaaaatgccaatgttctggcccgttatgccagtatctgccagcagaatggcatt

SEQ ID NO: 11963 - DNA, 650 bp, Homo sapiens
ccgggtagaagtggaggggccgttcgaagagtcgtgagggggtgacgggttaagattcggagagagaggtgctagtggctggacttgacctggaaagaatcttctgctgactctcaacttttcctggaaaaaatggatcattcccaccatatggggatgagctatatggactccaacagtaccatgcaaccttctcaccatcacccaaccacttcagcctcacactcccatggtggaggagacagcagcatgatgatgatgcctatgaccttctactttggctttaagaatgtggaactactgttttccggtttggtgatcaatacagctggagaaatggctggagcttttgtggcagtgtttttactagcaatgttctatgaaggactcaagatagcccgagagagcctgctgcgtaagtcacaagtcagcattcgctacaattccatgcctgtcccaggaccaaatggaaccatccttatggagacacacaaaactgttgggcaacagatgctgagctttcctcacctcctgcaaacagtgctgcacatcatccaggtggtcataagctacttcctcatgctcatcttcatgacctacaacgggtacctctgcattgcagtagcagcaggggccggtacaggatactt

SEQ ID NO: 11964 - DNA, 425 bp, Homo sapiens
gagtggacctatgagcagcggaaggtggtggagttcacgtgccacacggcattctttgccagcatcgtggtggtgcagtgggctgacctcatcatctgcaagacccgccgcaactcagtcttccagcagggcatgaagaacaagatcctgatttttgggctcctggaggagacggcgttggctgcctttctctcttactgcccaggcatgggtgtagccctccgcatgtacccgctcaaagtccctggtggttctgcgccttcccctacagcctcctcatcttcatctatgatgaggtccgaaagctcatcctgcggcggtatcctggtggctgggtggagaaggagacatactactgaccccattggaagaagaaccaggcatggaaagatggggagctctggaggtgttgtggggatggtgat

SEQ ID NO: 11965 - DNA, 275 bp, Homo sapiens
gcagccggctgccgctcccgacttttccttctccaaggagcagaggagtggctggcacaagggtcagctgtccaacggggaaccagggctggctcggtgggacagggcctcagaggtgaggaagatgggagagggacaagcagaggcaaggcctgcctgagactgaggaaggaaaggggtttgaccactcccgaggctgccatgcggtgggaccaccctgctgtccgtctcctgtggctgcccctctgcccgctcctgatggctcgccttgtctc

SEQ ID NO: 11966 - DNA, 400 bp, Homo sapiens
tgatatgagctatgtgcatcgtgatctggccgcacggaacatcctggtgaacagcaacttggtctgcaaagtgtctgattttggcatgtcccgagtgcttgaggatgatccggaagcagcttacaccaccaggggtggcaagattcctatccggtggactgcgccagaagcaattgcctatcgtaaattcacatcagcaagtgatgtatggagctatggaatcgttatgtgggaagtgatgtcgtacggggagaggccctattgggatatgtccaatcaagatgtgattaaagccattgaggaaggctatcggttaccccctccaatggactgccccattgcgctccaccagctgatgctagactgctggcagaaggagaggagcgacaggcctaaattt

SEQ ID NO: 11967 - DNA, 536 bp, Homo sapiens
aagctcgggattcggctcgaggacgagtccaaccatgaccctcagtttgagccaatagtttctcttcctgagcaagaaattaaaacactggaagaagatgaagaggaactttttaaaatgcgggcaaaactgttccgatttgcctctgagaacgatctcccagaatggaaggagcgaggcactggtgacgtcaagctcctgaagcacaaggagaaaggggccatccgcctcctcatgcggagggacaagaccctgaagatctgtgccaaccactacatcacgccgatgatggagctgaagcccaacgcaggtagcgaccgtgcctgggtctggaacacccacgctgacttcgccgacgagtgccccaagccagagctgctggccatccgcttcctgaatgctgagaatgcacagaaattcaaaacaaagtttgaagaatgcaggaaagagatcgaagagagagaaaagaaagcaggatcaggcaaaaatgatcatgccgaaaaagtggcggaaaagctagaagctctctcggtgaa

SEQ ID NO: 11968 - DNA, 220 bp, Homo sapiens
gcttctatgaccaaaatgagttgtaaattctctggtgcaagataaaaggtcttgggaaaacaaaacaaaacaaaacaaacctcccttccccagcagggctgctagcttgctttctgcattttcaaaatgataatttacaatggaaggacaagaatgtcatattctcaaggaaaaaaggtatatcacatgtctcattctcctcaaatattccatttgcaga

SEQ ID NO: 11969 - DNA, 91 bp, Homo sapiens
atctccgaagacttgaacactcactccacaacccaagaatctgcagctaacttattttcccctagctttccccagacaccctgttttattt

SEQ ID NO: 11970 - DNA, 506 bp, Homo sapiens; identical to SEQ ID NO: 3522

SEQ ID NO: 11971 - DNA, 227 bp, Homo sapiens
aaattatttgattattccaaaccatcagcaaaaagagccttcaaatacattcaggaagctgaaatgttacgttccatctcttttcatccttctggagactttatacttgtcggaactcagcatcctactcttcgcctttatgatatcaacacctttcaatgttttgtctcttgcaatcctcaagatcaacacaccgatgctatatgttccgttaattacaattctag

SEQ ID NO: 11972 - DNA, 431 bp, Homo sapiens
cttacgttactatccccaacatgcccattcgctttaccaagatcttgtacaatcagcaaaaccactatgatggctccactggtaaattccactgcaacattcctgggctgtactactttgcctaccacatcacagtctatatgaaggatgtgaaggtcaacctcttcaagaaggacaaagctatgctcttcacctatgatcagtaccaggaaaataatgtggaccaagcctccggctctgtgctcctgcatctggaggtgggcgaccaagtctggctccatgtgtatggggaaggacagcgtaatggactctatgctgataatgacaatgactccaccttcacaggctttcttctctaccatgacaccaactgatcaccactaactgatagcctacttcaggccaaacagccccaaagtcaattaaaggct

SEQ ID NO: 11973 - DNA, 540 bp, Homo sapiens
ccacagttccctgcagccaatcagggctgaaaatgcagattaccgcacaaatctctttgtacctacagttgaagctaatgttgagactgagacttacgaaactgtgaatcccactgggaaaaagactttttgtacatttggaaaagacaagcgagagcacactattctcattgccaacgttaaaccttatttaaaagccaaacgtgccctgagccctctcctccaagaggtcccctcagcatcaagcagcccaaccaaggcgtgcatcgagccttgcacctcaacaaaaggctccctggatggctgtgaagcaaaaccaggagccctggctgaagcaagcagtcagtacttgcccactgacagtcaatatctgtcacctagtaagcaaccaagagaccctcccttcatggcttccgatcagatggcaagggtctttgcagatgtgcattccagagccagccgggattccagtgagatgggtgctgttcttgagcagcttgaccaccccaacagggatctgggcaaaaagtctgtggatgc

SEQ ID NO: 11974 - DNA, 627 bp, Homo sapiens
ctggcttctatgctcccaagcccatcttctaggcacccagattgaggctccatggcaagcagcagggacaggggcagcaggtagcctgaccccaggaaagagatgtgggtgaccttgcatgtctccaggttacatccactaccagcctgcccaggaccggctgcaaccccacctcctggagatgctgattcagctgccggccaactcagtcaccaaggtttccatccagtttgagcgggcgctgctgaagtggaccgagtacacgccagatcctaaccatggcttctatgtcaggtgggctccacccccacaggccacctctcatccccctgacctaccctctctgctgcttaccccttgatagggcagccagatgggaacacgggccatctctctgcttctctgtagcccatctgtcctcagcgcccttgtgcccagcatggtagcagccaagccagtggactgggaagagagtcccctcttcaacagcctgttcccagtctctgatggctctaactactttgtgcggctctacacggagccgctgctggtgaacctgccgacaccggacttcaacatgccctacaacgtgatctgcctcacgtgcactgtggtggccgtgtgcta

SEQ ID NO: 11975 - DNA, 202 bp, Homo sapiens
ctgttttatttcagggttaccatccattgacccatcaggcagctccccatcttcctcttctgctcctctggcaagtttttccggcataccaggaacaagggttttcctgcaagggccagctcctgttgggactcctagtttcaacagacaacatttttctccccatccttggacaagcgcctcaaactcatgtaggaatcct

SEQ ID NO: 11976 - DNA, 263 bp, Homo sapiens; identical to SEQ ID NO: 3542

SEQ ID NO: 11977 - DNA, 316 bp, Homo sapiens; identical to SEQ ID NO: 2636

SEQ ID NO: 11978 - DNA, 562 bp, Homo sapiens
gcatgttttctcagcaaacacaatgggttataaatgtgtggtctgaggaaaggtatgtgatgattcatgggtcattcgtttacacatgagccggattcacggaggggcacatttaaataactttcttttctggtgtcggacatgcaaaaaggagttaacaaggtaaagatactatcatggcacatgtgactgaatttcataatggacacagatatttttatgagatggatgaggtagaaggtgaaactttgccatcatcctctacaacattggataatttgactgctaacaagccttcatcagctattactgttattgatcattccccggcaaatagttctccgaggggtaaatggcaatgccggatttgtgaagatatgtttgattcccaggaatatgtaaaacagcactgcatgtctttggcaagccacaagtttcatagatacagctgtgctcactgcagaaagccttttcataagatagaaacattgtaccgacattgccaagatgagcatgacaatgagataaagattaaatacttctgtgggctttgtgatcttat

SEQ ID NO: 11979 - DNA, 278 bp, Homo sapiens
  misc_feature 44: n = A,T,C or G
acattttcctcattgttccattgtaaatattcctcttgttggantctttttaatcctgagatttaaacctgtacctttcaattgtctgtgacctttcaatttcactttcaatagttgaagaacttggctttgtaaatctctcagaagcttgaaaatatcttgtctctaccccctcagcccatttcatttgccaataattattttgtaagtagggttgaaatgaactcagctggccttgtgaaatgtttaaacttgcacaaacaactacatttttgttc

SEQ ID NO: 11980 - DNA, 480 bp, Homo sapiens
agaagacaaaatgttttattttaaaacattgaaaaaacattaaaagacaaatgtccattatgtaaccaggaatgttaaatatatggaaacggtaaatctctaaaatgtggtaggtacttccagagctaaatgttgcaagttatcctacttttttctctaatatcaacaatacctgatacgatgaaaaataacaaaaagaccttactaattatccaatcaaagtcatcatctttgggtaaatttatatcaacacaacttaaagttttgtccaagatgttcctgacacatgaagcttccagttgaatttcagaaatgttaacaaaagtatcttccttttttgcctgtgaatgtttgagtattgctgtattgttggcttatatccactacagatactggttctaggccagcccaaggatcttcaagcattgaaggcttgaaataattttccaactcattagacattcttttttctctaacacg

SEQ ID NO: 11981 - DNA, 278 bp, Homo sapiens
  misc_feature 253, 258, 259, 260, 262, 265, 267: n = A,T,C or G
attttgaaaataacaactaaaagatgtataacatagcaaaactgcttaaacatcccattttgacacttgtcttgcagttagtttgacattttgtagttaatgattccaaattggtttagttgggccatctcattcttcacttcctgtaaaccactccatagatttgtctttcttcaagaaattagttttctttcctttatttgattgatggtcattgactactgaaataaaatatgcatttaagataaaaaanaaaannnanaananaaaaaagggcg

SEQ ID NO: 11982 - DNA, 496 bp, Homo sapiens
acccccttgctcactctcttgctcacagtccagatggcccggtccctggtgtgccttggtgtcatcatcttgctgtctgccttctccggacctggtgtcaggggtggtcctatgcccaagctggctgaccggaagctgtgtgcggaccaggagtgcagccaccctatctccatggctgtggcccttcaggactacatggcccccgactgccgattcctgaccattcaccggggccaagtggtgtatgtcttctccaagctgaagggccgtgggcggctcttctggggaggcagcgttcagggagattactatggagatctggctgctcgcctgggctatttccccagtagcattgtccgagaggaccagaccctgaaacctggcaaagtcgatgtgaagacagacaaatgggatttctactgccagtgagctcagcctaccgctggccctgccgtttcccctccttgggtttatgcaaatacaatcagcccagtgc

SEQ ID NO: 11983 - DNA, 442 bp, Homo sapiens
taagctcggaattcggctcgaggctgggggtgacaggctcatccatgagcaggacctggagtggctgcagcaggcggacgtggtcgtggcagaagtgacacagccatccttgggtgtaggctatgagctgggccgggccgtggcctttaacaagcggatcctgtgcctgttccgcccgcagtctggccgcgtgctttcggccatgatccggggagcagcagatggctctcggttccaggtgtgggactatgaggagggagaggtggaggccctgctggatcgatacttcgaggctgatcctccagggcaggtggctgcctcccctgacccaaccacttgacttaatctcactttcttaaattcttctattctcagacactgctctagtaccattccttcctcttagccccaggagcaaattaaaaggtacagttaaaatcct

SEQ ID NO: 11984 - DNA, 427 bp, Homo sapiens; identical to SEQ ID NO: 3568

SEQ ID NO: 11985 - DNA, 493 bp, Homo sapiens; identical to SEQ ID NO: 3570

SEQ ID NO: 11986 - DNA, 553 bp, Homo sapiens
taagctcggaattcggctcgagagctgggctgtcccttcagcccccacctgtcccttcctatgccctcagtgtctcgaagtacctcccgcagcagtgccaattgggaaaggcttcggcaagggaccctgaggagagacctgcgtgggataatcaacaggggtctggaggacggggagagctgggaatatcagatctgactgcgtgttctcacttcgcttcctggaacttgctctcattttcctgggtgcatcaaacaaaacaaaaaccaaacacccagaggtctcatctcccaggccccaggggagaaagaggagtagcatgaacgccaaggaatgtacgttgagaatcactgctccaggcctgcattactccttcagctctggggcagaggaagcccagcccaagcacggggctggcagggcgtgaggaactctcctgtggcctgctcatcacccttccgacaggagcactgcatgtcagagcactttaaaaacaggccagcctgcttgggcgctcggtctccaccccagggtcataagtggggagagagcc

SEQ ID NO: 11987 - DNA, 391 bp, Homo sapiens
taagctcgggaattcggctcgagcagctgcacacctatgtctgcctgatggcctcacccagcgaggaggagccccgtccgcgagaggacgacgtccccttcactgcccgggtcggcggtcgcagcctcagcacgcccaacgccctcagctttggctccccaaccagcagcgatgacatgaccctcaccagccccagcatggacaactccagcgcagagctacttcccagcggggactcgccactgaaccagaggatgacggagaacctgctggccagcctgtcggagcatgaacgcgcagccatcctcagtgtacccgcagcccagaaccctgaggacctccgcatgtttgccaggctccttcactacttccgcggccgccgactagtgag

SEQ ID NO: 11988 - DNA, 248 bp, Homo sapiens
  misc_feature 146, 209, 215: n = A,T,C or G
gaacgtgtgggtgggtctcccccagccctccctcctggcgggtctcctccagcctcacttcgctgccacttcgccgctgccccggagacttttcaatcccaccccactcctcatctcaccatttggtcaaattggaagcccagggncaggaccccgaggtttagaagatgcttgggcttggagggaggagggccggcgaggctagcgangggacnggagacggccctgctgcggacggagcgcggaaa

SEQ ID NO: 11989 - DNA, 540 bp, Homo sapiens
ggaaaaatgagcacacataatctgctactcctgctgactgataatgaggcctggaacggattcgtggctgctgctgaactgcccaggaatgaggcagatgagctccgtaaagctctggacaaccttgcaagacaaatgatcatgaaagacaaaaactggcacgataaaggccagcagtacagaaactggtttctgaaagagtttcctcggttgaaaagtgagcttgaggataacataagaaggctccgtgcccttgcagatggggttcagaaggtccacaaaggcaccaccatcgccaatgtggtgtctggctctctcagcatttcctctggcatcctgaccctcgtcggcatgggtctggcacccttcacagagggaggcagccttgtactcttggaacctgggatggagttgggaatcacagccgctttgaccgggattaccagcagtaccatggactacggaaagaagtggtggacacaagcccaagcccacgacctggtcatcaaaagccttgacaaattgaaggaggtgagggag

SEQ ID NO: 11990 - DNA, 81 bp, Homo sapiens
tggtacgcctgcaggtaccggtccggaattaattcccgggtcgacgagctcactagtcggcggccgcccttttttattttt

SEQ ID NO: 11991 - DNA, 597 bp, Homo sapiens
ctggtacgcctgcagtaccggtccggaattcccgggtcgacccacgcgtccgtgcccttcgtccgtggccagagcttctcagtgtggatcttgtgtgaagctcactgcctcaaggtggccgtggatggtcagcacctgtttgaatactaccatcgcctgaggaacctgcccaccatcaacagactggaagtggggggcgacatccagctgacccatgtgcagacataggcggcttcctggccctggggccgggggctggggtgtggggcagtctgggtcctctcatcatccccacttcccaggcccagcctttccaaccctgcctgggatctgggctttaatgcagaggccatgtccttgtctggtcctgcttctggctacagccaccctggaacggagaaggcagctgacggggattgccttcctcagccgcagcagcacctggggctccagctgctggaatcctaccatcccaggaggcaggcacagccagggagaggggaggagtgggcagtgaagatgaagccccatgctcagtcccctcccatcccccacgcagctccaccccagtcccaagccaccagctgtctgctcctg

SEQ ID NO: 11992 - DNA, 138 bp, Homo sapiens
cacctccatccatgaagcagtcaccaaaatccagtgaagaaacaccacccgtccagtaccaccaaagtagttctctgtcatgtgtgttccctgcctgcacaaacctacatgtacataccatggattagagacacttgc

SEQ ID NO: 11993 - DNA, 589 bp, Homo sapiens
tggtacgcctgcaggtaccggtccggaattcccgggtcgacccacgcgtccgcttaagtagccattggaaatttatattcttaactaggtcaaaaaataatgagccataagtttatgtcctctcacttagacattttctctttaaaaaggtattttcttctttataaacattttaaaagagccttcccttcttaaactaactccagtgcatgaagtgtgaaaatattttaaaatgacatttttactaatatgagcaagtcatgtaaacattgaagaacttggtaacatattagtaaatggatattaccaaatgttttcatcgttaattactttgcgttccaccaaaatatctttactaaaatgtgcttggtgtagtttgtttattgtctaaattagtaccagtcatcttatttctgcaaaatgagtatcaatgtgaaaaagacacgtgaagattaagcatgtttgaaaataaaatggtcaattacatttcaatttacataggccaacaactgttccatactttgtttgtaaacatttaatttctctactggacaaaattaatatttggctttacattgaattttgagct

SEQ ID NO: 11994 - DNA, 185 bp, Homo sapiens
  misc_feature 46, 178, 181: n = A,T,C or G
gggaactgggaacagccaggtgccccaaagcaaatacgcggagtgnctggccatcattgaagagctggggaaggagatcagacccacgtacgcaggagcaagagtgccatggagaggctgaagcgcggcatcattcacgctagaggactggttcgggagtgcttggcagaaacggaanganatgc

SEQ ID NO: 11995 - DNA, 285 bp, Homo sapiens
  misc_feature 25: n = A,T,C or G
agagattgctaatgagatgattgangcagccaaggccgtctatacccaggattgccccctggcagcagcgaaagccatccagggcctacgggctgtgtttgatgagacctatcctgaccctgtgcgagtcgtctccattggggtcccggtgtccgagttgctggatgacccctctgggcctgctggctccctgacttctgttgagttctgtgggggaacgcacctgcggaactcgagtcatgcaggagcttttgtgatcgtgacggaagaagccattgccaaggg

SEQ ID NO: 11996 - DNA, 157 bp, Homo sapiens
tgtctgtggacaaagaactctgcagtggttcttatttgcatgatttctgctggtggaggctgtaaatgtgagctcaaactcccacataagtgagttttcattgtaatccagaatgtttttaaatcaccctacttctattgaacttgcactatcatct

SEQ ID NO: 11997 - DNA, 231 bp, Homo sapiens
atcagttacagcaatcattcaatctgaaacagggaaatggcacaatctgaagagatgtggtatatgatcttaaatgatgaacatgagaccgcaaaaattcactcctggagatctccgtagactacaatcaatcaaatcaatagtcagtcttgtaaggaacaaaaattagccatgagccaaaagtatcaataaacggggagtgaagaaacccgttttatacaataaaaccaa

SEQ ID NO: 11998 - DNA, 266 bp, Homo sapiens
gagggcgctcctgtttttaaaacattttgaaaacccctggctgaacagtgctctgcctctaactccctcctcacactccagaattacccttcctcatctgtgcctgtctgtccaacccctcccccacgtctctctgcctgctgggctcttaactgttgctcgaagactgtgacatcagaagtaactcccactcctaatcaagagtctctccagcctcacagatgctggcctcttggcacctgcctagctcttgggcctgacctcca

SEQ ID NO: 11999 - DNA, 183 bp, Homo sapiens
ggccgcccttttttttttttgggccccccccgttttggggggggttgcccccaaatcccttttttaaaacctttcaaaaaaaggggccttttccaaaaatttttaaaaaggccttttggggggccaaaattttggcccagggaaccctttttaaaaaaaccatggggttttttaaaaccgggg

SEQ ID NO: 12000 - DNA, 498 bp, Homo sapiens
cctgctattagaccaccccctcatggcacaactgcccctcacaagaattcagcttcagtgcaaaattcatctgttgcagtcctcagtgtcaatcacattaaaagacctcacagtgttccctcttctgtccagctaccttcgaccttaagtacacaaagtgcttgtcagaattcagtacatccagcaaataagcctattgctcccaatttcagtgcccccttaccatttgggccctttagcacattgtttgaaaacagccctacttctgctcatgccttctggggaggatctgttgtttcatctcagtcaacaccagaatctatgctatcaggaaaatcctcatatttgccaaattcagatcctttacatcagtctgatacttccaaagctccaggttttagaccaccattacagagacctgctccaagtccctcaggtattgtcaatatggactcgccatatggttctgtaacaccttcttcaacacatttgggaaac

SEQ ID NO: 12001 - DNA, 495 bp, Homo sapiens
ccaagccccacttacaagatgtaggcgatgacacctatggaccagcaatccacagccttgctgtagggcttctgggccaggacttcaggggctgtggagggaagaggacgtggtggtgacaaatctctgcccttcaactcctggttccccccaccatcacagccccagcccagggccctccgcacccacgtatcccggagttccacaggcggtggagagcacactgcccgggtcctccatcttggagaggccaaagtcggagatcatgattttggagtcttcatccaggctgtagtacagcagattctctggcttgaaggtcaggagggaagagaaggggcaatcagagatggttggaggctggtagaaccttctgccgctccaagcaccttctgagaaataatggatccccaaaagccactgtggcttcatggctgtcataagaaaatcaaggaagctctcaagaaggccaaaaattccaggaaggacaaggct

SEQ ID NO: 12002 - DNA, 627 bp, Homo sapiens
cccccggcatgcaggaattcggcacgcttggttccgcgttccctgcacaaaatgcctggcgaagccacagaaaccgtccctgctacagagcaggagttgccgcagccccaggctgagacagggtctggaacagaatctgacagtgatgaatcagtaccagagcttgaagaacaggattccacccaggcaaccacacaacaagcccagctggcggcagcagctgaaatcgatgaagaaccagtcagtaaagcaaaacagagtcggagtgaaaagaaggcacggaaggctatgtccaaactgggtcttcggcaggttacaggagttactagagtcactatccggaaatctaagaatatcctctttgtcatcacaaaaccagatgtctacaagagccctgcttcagatacttacatagtttttggggaagccaagatcgaagatttatcccagcaagcacaactagcagctgctgagaaattcaaagttcaaggtgaagctgtctcaaacattcaagaaaacacacagactccaactgtacaagaggagagtgaagaggaagaggtcgatgaaacaggtgtagaagttaaggacatagaattggtcatgtcacaagcaaatgtgtcgaga

SEQ ID NO: 12003 - DNA, 355 bp, Homo sapiens
  misc_feature 94, 277, 351: n = A,T,C or G
gaagagatcggcacagacccaagcatgaccccagcacgtgggagtgatgtgttggaggtgtgcaccaggctcttgaggcgctggctctgcactncaggcatagcacctttcctgcccacaggacaacgaggccctcttggaggaggcgaagatgatgaacagactgagacacagccgggtggtgaagctcctgggcgttcatcatagaggaagggaagtactccctggtgatggagtacatggagaagggcaacctgatgcacgtgcttgaaagccnagggtagagagggcccctccgcacggggattccccagcgctttgggccctggctgttttgtttattggctcccntttg

SEQ ID NO: 12004 - DNA, 519 bp, Homo sapiens; identical to SEQ ID NO: 789

SEQ ID NO: 12005 - DNA, 562 bp, Homo sapiens
  misc_feature 499: n = A,T,C or G
tggtacgcctgcaggtaccggtccggaattcccgggtcgacccacgcgtccgggacattgtggacagcataaaaggagaattatctgggcattttgaagacttactgttggccatagttaattgtgtgaggaacacgccggcctttttagccgaaagactgcatcgagccttgaagggtattggaactgatgagtttactctgaaccgaataatggtgtccagatcagaaattgaccttttggacattcgaacagagttcaagaagcattatggctattccctatattcagcaattaaatcggatacttctggagactatgaaatcacactcttaaaaatctgtggtggagatgactgaaccaagaagataatctccaaaggtccacgatgggctttcccaacagctccaccttacttcttctcatactatttaagagaacaagcaaatataaacagcaacttgtgttccgaacaggaattttcattgttctataacancaacaacaaaagcgattattattttagagcatctcatttataatgtagcagctcataaatgaa

SEQ ID NO: 12006 - DNA, 461 bp, Homo sapiens
tggtacgcctgcaggtaccggtccggaattcccgggtcgacccacgcgtccgtgcctgctcttttctgttggccttggtcacttccatgtgcatgagcatctccatccaaaagtggccttcttctctagccccgatgggatgtcagtagcccatgtttctaatagaagacccatgccaaagccactttgacaactctccagctcgcaggaatgctgtcggcctctagctaaactgttatggtccactcaacgctgtacactgtgtggccactttcctccgcttcctgtacattgtcaggaggttgtaaggcagcaccaggggctgacctctcaggacttgcagcagcagagcccagctgggtacacctgtctaaaaaccacagcacagcagtagctgctcaatggagacattgttctctgcatcccaaagccaggaattcaaaataaagcttggcttccat

SEQ ID NO: 12007 - DNA, 578 bp, Homo sapiens
tggtacgcctgcaggtaccggtccggaattcccgggtcgacccacgcgtccgcggacgcgtggggtcagaagggacaaactgtccacccaaggaacagcctggcgatctttttaatgaggactgggactcggagttgaaagcagatcaagggaatccatatgatgctgacgacatccaggagagcatttctcaagagcttaaaccttgggtgtgctgtgccccacaaggagacatgatctatgaccccagctggcaccatccgcctccactgataccctattattccaagatggtctttgaaacaggacagtttgacgatgctgaagattgagtgtggagctttctgccttgtaggtgggcgggcctccacgtcaagatctcttttcctgtcttggaggtgaaaagtcatatctgagaaaatgtttgcagtgacccctagtctggggtacacagaccagtgttccttattgacagtgttcaataaggccccgtcattctcgccagtctgttgttggtcttaatgggctcctccttgaaatgtgtgtgtgtttgtgtcaagaggagttgtgttctttgt

SEQ ID NO: 12008 - DNA, 495 bp, Homo sapiens
tggtacgcctgcaggtaccggtccggaattcccgggtcgacccacgcgtccgtaagatggaagcgtttttggggtcgcggtccggactttgggcggggggtccggccccaggacagttttaccgcattccatccactcccgattccttcatggatccggcgtctgcactttacagaggtccaatcacgcggacccagaaccccatggtgaccgggacctcagtcctcggcgttaagttcgagggcggagtggtgattgccgcagacatgctgggatcctacggctccttggctcgtttccgcaacatctctcgcattatgcgagtcaacaacagtaccatgctgggtgcctctggcgactacgctgatttccagtatttgaagcaagttctcggccagatggtgattgatgaggagcttctgggagatggacacagctatagtcctagagctattcattcatggctgaccagggccatgtacagccggcgctcga

SEQ ID NO: 12009 - DNA, 489 bp, Homo sapiens
tggtacgcctgcaggtaccggtccggaattcggctcgaggtcctgcaggccatctacgtgattgacttcttctggaacgaaacctggtacctgaagaccattgacatctgccatgaccacttcgggtggtacctgggctggggcgactgtgtctggctgccttatctttacacgctgcagggtctgtacttggtgtaccaccccgtgcagctgtccaccccgcacgccgtgggcgtcctgctgctgggcctggtgggctactacatcttccgggtggccaaccaccagaaggacctgttccgccgcacggatgggcgctgcctcatctggggcaggaagcccaaggtcatcgagtgctcctacacatccgccgacgggcagaggcaccacagcaagctgctggtgtcgggcttctgtggcgtggcccgccacttcaactacgtcggcgacctgatgggcagcctggcctactgcctggcctgtggcggt

SEQ ID NO: 12010 - DNA, 51 bp, Homo sapiens
gccgccttttttttttttttttttttttttttttttttttttttttttttt

SEQ ID NO: 12011 - DNA, 270 bp, Homo sapiens
  misc_feature 256, 263: n = A,T,C or G
ggcccaggggcccctggagccccaggccccaaaggtgaatcgggagactacaaggccacccagaaaatcgccttctctgccacaagaaccatcaacgtccccctgcgccgggaccagaccatccgcttcgaccacgtgatcaccaacatgaacaacaattatgagccccgcagtggcaagttcacctgcaagtcaccaccggtggcatggtcctcaagctggagcagggggagaacgtttcctgcaggccacgganaagaaantcattat

SEQ ID NO: 12012 - DNA, 278 bp, Homo sapiens
  misc_feature 24, 33: n = A,T,C or G
ataaatttgacttttctgtaattnaggtttttnctttttttgtaccattttaaagttagtatcttttgatatgcatatttgtttatggtaaaaaatttataacgtgttcaatattttcttttcccccattaatcagttcattagaaatattttaaaatcagctattttgtgaagccatgagttccagaaagtaaaggtgacatcggaaaaataatcaaaagctatttaaagcatctataaggtgcctctttctgtcttctacagatgagtcacacctt

SEQ ID NO: 12013 - DNA, 809 bp, Homo sapiens
tttttttttttttttttttttaaaaggggccacaagctttattaaaagtaaatgcaacagtaatatgtacagatggcacatggtcaattctttatttgtaaatatagtactccaactcaagtttacaagttacacctttgccacagccttggctaaatcttgaactagtgcagaattcagctgtggtagagtgctgatcttagcatgcttcgatgtggcatacttgttcttgacagtcatgtgctttgtaagtccttgatttaccatgactacattcttagccaggtgctgcataactggaagaagagattcttcagtatatgacaggtaatgttgtagagttggtgtccattccaccttaacccggaatttccagtgctaagcaaaaagctcctgctgcaattcgagaaggaggaaagtgcaccatgtcatagtccaacatagttagttccatcaggtatttggccaaagtatgttgctcgacatcaacctctccaatcttagatgctctccgaagaatgtgcaaaggtagaggccgacccagaccaaagtttaaagctcttagaatcttcatttccatctgtctgatttggtgcttagtataagtgttgtcagtcacaaaagcaaagtcaccaatttctggagggtacatttcttcatattggctgcaataaacatggcagtgacaccaaccagctgcagcatcttcttgggcacacaatattctgcatgaaccgttcaaaatggagacagtctgtacatggtctcctgcaacacctgaaattcattgatctgtacaagcagtcaat

SEQ ID NO: 12014 - DNA, 76 bp, Homo sapiens
gggcttattcagttttgattatccatgtctgttttgggagcagataagcaaaactgaataagcccaatcttggcct

SEQ ID NO: 12015 - DNA, 622 bp, Homo sapiens
ggagagtagcagtgccttggaccccagctctcctccccctttctctctaaggatggcccagaaggagaactcctacccctggccctacggccgacagacggctccatctggcctgagcaccctgccccagcgagtcctccggaaagagcctgtcaccccatctgcacttgtcctcatgagccgctccaatgtccagcccacagctgcccctggccagaaggtgatggagaatagcagtgggacacccgacatcttaacgcggcacttcacaattgatgactttgagattgggcgtcctctgggcaaaggcaagtttggaaacgtgtacttggctcgggagaagaaaagccatttcatcgtggcgctcaaggtcctcttcaagtcccagatagagaaggagggcgtggagcatcagctgcgcagagagatcgaaatccaggcccacctgcaccatcccaacatcctgcgtctctacaactatttttatgaccggaggaggatctacttgattctagagtatgccccccgcggggagctctacaaggagctgcagaagagctgcacatttgacgagcagcgaacagccacgatcatggaggagttggcagatgctctaatgtac

SEQ ID NO: 12016 - DNA, 572 bp, Homo sapiens
ccaagaattcggcacgaggaagaaaacaaacaaaacaactgggaagaagctgcaaaattgttgaaggaagcaattaacaaaccatatgaaaaagttcgaatatacagaatggatgggtcatatcgttctgttgaattgaagcatggaaataataccacagtgcagcagataatggaaggaatgcgtctctctcaagaaactcagcaatatttcactatatggatttgttcagaaaacctcagccttcaactcaaaccatatcataaacccttgcaacatgttcgtgactggccagaaatacttgctgaattgactaatctggatcctcaaagggaaacacctcagctttttctaagaagagatgtgagacttcccttggaagttgaaaaacagattgaagacccactagctattcttattctctttgatgaagccagatataatttattgaagggcttttatacagctcctgatgctaagctgataacattggcaagtctgcttttgcaaatagtctatggaaattatgagagtaaaaaacacaagcaaggtttcctaaatgaagaaaatct

SEQ ID NO: 12017 - DNA, 558 bp, Homo sapiens; identical to SEQ ID NO: 336

SEQ ID NO: 12018 - DNA, 177 bp, Homo sapiens
gaaaaatcatgtccaaagtcttgggcatgcttgtcacagccaacatcctgacatggaaagtttatgtttctgtccctgggcctccttctacctcccactaaatcatagacattgccagattgcagaccctgtcttcatagaagtgtgaaatgtaaaagtgtgtgaaagtagtgtctc

SEQ ID NO: 12019 - DNA, 202 bp, Homo sapiens
aaaacagaaatgtcataaaggataactatttgcccttgaaaatagtatagttaatctgttggaacagaacacctttgagaaacatgaaaattatcaagaagaataaaatgcctgaagcagattaaaaacatacatgctgaagaaatgtggagtaaagaagaaatttgggtaggttccttgaagagataaattagagactcca

SEQ ID NO: 12020 - DNA, 188 bp, Homo sapiens
gaagtgcgtaaatattacctatggtagtaaacgtttaattatcattcagtttaaatgttggccttctgtatgtagccaagaacagctcattttgtgaatttcagtttttaagtggctgctttttgatttggttgtattattttattataatgtatttgcaagtatattaaaaaattaacattgagcca

SEQ ID NO: 12021 - DNA, 191 bp, Homo sapiens
aaactaattagtgaagagtaagaaaaaaactagccaacagaattgtaggtgatgcattagttaaatttcaaaactcataataaaggaactttcagagattggttgaaacccagtggtatccctgtaaattagctcctgtgactggaaaagaccccaaaaaggcagtagaggagattagtgtttacttgctg

SEQ ID NO: 12022 - DNA, 528 bp, Homo sapiens
tggtacgcctgcaggtaccggtccggaattcccgggtcgacccacgcgtccggtccaagaagctgttgactggcgtctctttcgtaacatttttatggcctggtttgtcacagtccccatttctggagttatcagtgctgccatcatggcaatcttcagatatgtcatcctcagaatgtgaagctgtttgagattaaaatttgtgtcaatgtttgggaccatcttaggtattcctgctcccctgaagaatgattacagtgttaacagaagactgacaagagtctttttatttgggagccagaggagggaagtgttacttgtgctataactgcttttgtgctaaatatgaattgtctcaaaattagctgtgtaaaatagcccgggttccactggctcctgctgaggtcccctttccttctgggctgtgaattcctgtacatatttctctactttttgtatcaggcttcaattccattatgttttaatgttgtctctgaaaatgacttgtgatttttttttctttttttt

SEQ ID NO: 12023 - DNA, 255 bp, Homo sapiens
ggaacagtcacagtgcaggtgctggaagccatccccaccagcggcctcactgcggcggacgtccctgcgctcgtggacacctgccaacgggccatgaggaccaccttcctccacatctccaagaccccccaggagaacggggccactgcggggtctggcgtgcagccggcccagtagcccagaccacggcagggcatgacctggggagggcaggtggaagccgatggctggaggatgggcagaggggactcctcc

SEQ ID NO: 12024 - DNA, 504 bp, Homo sapiens
cccgggtcgacccacgcgtccgaagagttctgaatatgatgattttttggacgaattcatggaggcagtttcttccaagtatggcatgaattgccttattcagtttgaagattttgccaatgtgaatgcatttcgtctcctgaacaagtatcgaaaccagtattgcacattcaatgatgatattcaaggaacagcatctgttgcagttgcaggtctccttgcagctcttcgaataaccaagaacaaactgtctgatcaaacaatactattccaaggagctggggaggctgccctagggattgcacacctgattgtgatggccttggaaaaagaaggtttaccaaaagagaaagccatcaaaaagatatggctggttgattcaaaaggattaatagttaagggacgtgcttccttaacacaagagaaagagaagtttgcccatgaacatgaagaaatgaagaacctagaagccattgttcaagaaataaaaccaactgccctcat

SEQ ID NO: 12025 - DNA, 480 bp, Homo sapiens
tggtacgcctgcaggtaccggtccggaattcccgggtcgaccccgcgtccgaaattcttcaaactctctgaatggaggcctatttagaaaacatagaaaaagaagaggaacgaaaagatgataatgatgaggaggaggaagatattgatttttttgaagatattgattctgatgaagatgaagggggactgtttggaagtaaaaaacttaagtcaggtaaaagttccagaaatctgaaatacaaagatttttttgatccagttgaaagtgatgaagacataacaaatgttcatgatgatgagctggattcaaacaaagaagatgatgaaattgctgaagaagaagcagaagaactaagtatttcggaaacggatgaagatgatgaccttcaagaaaatgaagacaataaacaacataaagaaagcttgaaaagagtgacctttgctttaccagatgatgcggaaactgaagatacaggtg

SEQ ID NO: 12026 - DNA, 263 bp, Homo sapiens
gcaccacccatcttcactggccggccctttgtggtagcgtgggacgtgcccacacaggactgtggcccacgcctcaaggtgccactggacctgaatgcctttgatgtgcaggcctcacctaatgagggttttgtgaaccagaatattaccatcttctaccgcgaccgtctaggcctgtatccacgcttcgattctgccggaaggtctgtgcatggtggtgtgccacagaatgtcagcctttgggcacaccggaagatgctgca

SEQ ID NO: 12027 - DNA, 297 bp, Homo sapiens
ggccgccctttttttttttttttaaaaaatattattttttttaggggcccttccccccccgggggggggcaagtttttgggccctaaaaaaccttgggtcggaaaaaaaaaggggaaaaaattggcttttcccttttaaaccccggctttttgggggattttgggcccctggggaaccaaccaaaaaaaagggctaaaaccccccccctattttcggttttaaaagggaaaaattcccgggggatttaaaaaacccgggggaaaaggggccccggggggggggaaccccccctccac

SEQ ID NO: 12028 - DNA, 202 bp, Homo sapiens
ccgccgcgggtgtgcggtctcgattcgctgaattgcccgtttccatacagggtctcttccttcggtcttttgtatttttgattgttatgtaaaactcgcttttattttaatattgatgtcagtatttcaactgctgtaaaattataaacttttatacttgggtaagtcccccaggggcgagttcctcgctctgggatgcagg

SEQ ID NO: 12029 - DNA, 465 bp, Homo sapiens; identical to SEQ ID NO: 798

SEQ ID NO: 12030 - DNA, 607 bp, Homo sapiens
ccaagaattcggcacgagaccctgagtatcttcagtcttgaatactcgaaaaagcctggttgccaaaaagccaaactctctttcacaagcatccgagagggttgcaatcatttcagccagagaagtttctccacctacactggacagtctattgtaatctgtaaacaaaaacctcacaggtaaagctttagtagtctgctctggcaactcaggtggattcacaaacatcaatttaaggaggagttccaaatatccaatatgtcttgccaatctagtgctgaggacccaggcccaattccaactctctccttctcttcgtccaccaaagtaaatgacaataaagaatatatataagagagccaagaagctcagtgacactgctattccaagatttgggtggaccgtgaaggcaaacaataaaccaagccctccacaaagtagcagggtaagaaacactatgagccatgagaactgaaagagaggctcaatctgttgtccggcgaaggttttcatttcgtcttctagtttcttgagtaagaaagatttcccacttccccactgtgcatataaccccacacaaatgggtggctgcatggtaggctcactg

SEQ ID NO: 12031 - DNA, 499 bp, Homo sapiens
gtaagattttttttttagcaagcatattaaagataaaatgctatgatattttattaaatgaattaaggtgtttgttgttaaaatgtcttctattttaggacatatagcaacatagttgcttgctgtttatgaatagtgcttaaatattacttcctcatggtctaaaatagtgtccctcaccccactatcactcactgcacctatattttgctttatttttcttcaaaacagtatcactccttctgactatatttattagtctattttcatcaactagattagcctttgttttattcattgctgtgtaatgagtgtctaaagcaatgtgtagcacgttgaaggtattcagtaatttgttaaaagaatgaaagagtaaacatttgccgcttataaaaggaaatatgccaaatttcaagtagatattgaaattatttgaaataactcatgagatatagaggaaggcaagctgttacaatgtagtcatatgcagatgataata

SEQ ID NO: 12032 - DNA, 196 bp, Homo sapiens
  misc_feature 68, 69: n = A,T,C or G
cttagagctcattttgttttatctcctcattgtatggataaagtgtagtgcaaaagagtgagttctannccagaggtaggccaataatttaattttcccaactcacgggccaaggttctttccactgcaccataatactgatccccaattttaaggttccttgtctgtccttctaaaccatcaattcactcaacaa

SEQ ID NO: 12033 - DNA, 290 bp, Homo sapiens; identical to SEQ ID NO: 2542

SEQ ID NO: 12034 - DNA, 264 bp, Homo sapiens
gctggctcttcgcacgcggccatggccgactccgagctgcagctggttgagcagcggatccgcagcttccccgacttccccaccccaggcgtggtattcagggacatctcgcccgtcctgaaggaccccgcctccttccgcgccgccatcggcctcctggcgcgacacctgaaggcgacccacgggggccgcatcgactacatcgcaggcctagactcccgaggcttcctctttggcccctccctggcccaggagcttggactg

SEQ ID NO: 12035 - DNA, 309 bp, Homo sapiens
ggccgcccttttttttttttttttatttttaaaaaccaaaattttttgggttaacaaaccgggaactttttaaaaaaaaacgggttgctgaaaaaggggccttttggggttaaggggtggtcccttccggaaacccatccctaatttgggggttaaaaattttaagggccctttttcacccattccggggggttttccgtttttaacccttggccccccatttatattttttttggccctggggggggaacccccttttcccaagggtcaatttttaaagggggggggcctaaaacccacagggggggc

SEQ ID NO: 12036 - DNA, 292 bp, Homo sapiens; identical to SEQ ID NO: 2876

SEQ ID NO: 12037 - DNA, 264 bp, Homo sapiens
cattctctaactccgtgtgtgatgaaaacgcctccttttctgaccttcaaagtcccctgtagagaccatgcatgctctaagccttagggagtgagaccaacacccatccctgcccagccaacagtggccggggcttgtcttatgtttccatctgttttcttcgtggcattcaatttcatttttttccttttcattttcatgttattttcattattggcaaagaaaatcaaaatgtttatagccaaataacaaatgtgccatgta

SEQ ID NO: 12038 - DNA, 335 bp, Homo sapiens
ggccgcccttttttttttttttttgaaaaaaaattttttttttttgccccgggtgggattaaatggccaaattttgggttgtgggaaccccccccttggggggtaaatttttccggcgggacttcccgggggggggggaaaaaagggccccccccccctggcggggaaatttttgtttttttaaaaaaaagggggttttttttgtttggcccgggttgttcccaacttttttttttaaaaaaattggcgggtttggccccccaaagggggggggttttacaagggggcccccccccccccaccaaaaaacatttttttaaaaagggggggggctt

SEQ ID NO: 12039 - DNA, 253 bp, Homo sapiens
  misc_feature 190: n = A,T,C or G
ccagacccgaattcccagaacctttgaccgcttttgtggcctcatggttcaacttttacacaagctcagtgttcgagcagctgatggcccccagaagcttttgaaggtgaggtattgaaacctgttagttgaaggctggttctgggaatgtttctggggctgacttttctctcttttttactttaggtanttaagaatccagtatcagatcactttccagttggatgtatgaaagttggcacttctttttcat

SEQ ID NO: 12040 - DNA, 479 bp, Homo sapiens
  misc_feature 214, 319, 337, 370, 453, 468, 477: n = A,T,C or G
gtacaagtacttcccttcctcgctctcaccagtgacgccctcagagtccctgccaaggccccgcgaccactgcccacccaacagcagccacagccatcacagaagttagggcgcatccgtgaagatgagggggcagtggcgtcatcaacagtcaaggagcctcctgaggtacagccacacctgagccactctcagatgaggacctacctctggntcctgacctgtatcaggacttctgtgcaggggcctttgatgaccatggcctgccctgggatgagcgacacagaagagtccccattcctgggaccccgcgctgganaggagggcagtgaaagtnaagcatgtgaagcgttcgggagaagaagtcttnagaagaagaaggaggagcgttacaagcggcttcggcagaagcaggaagcacaaggttaattggaaacacccagagagggtttnttgccaaggaccttncttcattgncc

SEQ ID NO: 12041 - DNA, 614 bp, Homo sapiens; identical to SEQ ID NO: 337
  misc_feature 555, 569: n = A,T,C or G

SEQ ID NO: 12042 - DNA, 638 bp, Homo sapiens
  misc_feature 354, 466, 472, 520, 537, 562, 612, 630: n = A,T,C or G
aggaaagaaactaaactgaagatgatgaagaatattaaccaagcaccttttatggacccttgcattcactgataactttctggcagcatctactttttagtgtaactaatgtcaaactgtatcatcaaaaacaaagatctgaaagaaaaaaacatctgatattttaacagctgccaatatctcccacaataactgcgtgaagaaggaattttttaattacttaacctacgtgaaaagaaaagggctaaaagtgatgcctacaaatacattactttctggggaaagaaaagaattccaagaatgtttgcaataatggcctccaatactgaaacaaccaaaagcaggtgaaatganggctgaaatcaaggctgtttcattttagctgaaggacctgcaaagctgcttgggatttctagcagttgaaaacctaacctgcattgatgcttaatcatccatccacatgaanatggcngtcagctatacgcatcaggactcgtttggcaaaaccattgatttttcngtatgtgggataagggnttggggttttttggttttttgggcngtataagggattatgtgtgtgtgagtggggatgtatggatatgggatagncccatttccagggatggntgttgggg

SEQ ID NO: 12043 - DNA, 367 bp, Homo sapiens
  misc_feature 157, 167: n = A,T,C or G
cactgcccacttcctgccctcccgtttggccatgggtgcccccctctgtctcagtgtccctggatcctttttccttggggaggggcacaggctcagctcctctctgaccatgacccaggcatccttgtccccctcacccacccagagctaggggcgngaacagccanccttttggttggcaccgcttctttctgcctctcactggttttctcttctctatctcttattctttccctctcttccgtctctaggtctgttcttcttccctagcatcctcctccccacatctcctttcaccctcttggcttcttatcctgtgcctctcccatctcctgggtgggggcatcaaagcatttctccccttagg

SEQ ID NO: 12044 - DNA, 599 bp, Homo sapiens
  misc_feature 482, 586, 588: n = A,T,C or G
gacacatcattaaatatttaatcaccttttgaagtcctaagcctttatcataattcatccatctagacagttcattctatactatagattccaaggcccccttaagagggggagtaaaaagaaaattgggagagaaaaccctctgagaggcagggttaaattatctcaaagatgactttctattgatgctgtagtgaacttgcttcaccccgaaacccaccaatccacagtagggtcaaccgattaagtccactgctttttagtctccaagaatcagttttacaaaagatgccacatctgttcctttggattcatgtagggtgaaaaatggatgttgcattagctctgggtatgtaggccgttctttggaattcttctttaagcactgtgaggtaaagtcaacaaactctgcagagaacttgtctgctggaagttgtggcgatggctcctctaccacctgtttgagctgctgaatgggagtnccccatgaatcatagggaaatcgaaggatggccaactcaatcatcgtgatgcccagaactcaaatgtcagactcacactgtatccttctggttgagctctgggntnattctttcagg

SEQ ID NO: 12045 - DNA, 474 bp, Homo sapiens; identical to SEQ ID NO: 3593

SEQ ID NO: 12046 - DNA, 492 bp, Homo sapiens; identical to SEQ ID NO: 3595

SEQ ID NO: 12047 - DNA, 353 bp, Homo sapiens
gactgtcaatggagctggaaaacatcgtggccaacacggtcttgctgaaagccagggaagggggcggaggaaagcgcaaagggaaaagcaagaagtggaaagaaatcctgaagttccctcacattagccagtgtgaagacctccgaaggaccatagacagagattactgcagtttatgtgacaagcagccaatcgggaggctgcttttccggcagttctgtgaaaccaggcctgggctggagtgttacattcagttcctggactccgtggcagaatatgaagttactccagatgaaaaactgggagagaaagggaaggaaattatgaccaagtacctcaccccaaagtcccct

SEQ ID NO: 12048 - DNA, 797 bp, Homo sapiens
  misc_feature 675: n = A,T,C or G
tttggaggtgtaagtgaatttttattgggaggggaggttggcaacttaaacagcagcaaataaagagtgaataaggaaactccctgttgccacagatgcacaagacctccgtatgtgatacaggagccatttcaatttgtgacccctagacagagatggcaagtgcttttccattcaatctaatacttccggattcctactaaaaaggaatacattaagagcatggaaaagttgcttactgaaaggaaacccccgaagagtaagggagggaatgtagaaattaagaagttatgtggaatactctttaaattgtaattaactacattttcttattttcacagtaatacaaaacacagtcacttgcagaactggttcagattacttaaataccagatacatttttagtcctctacataagtgcttgggagttacttatgtttatatgaaatgaagctattaatacttttctacagcagtactgcacaccaggaaggccaagacaaacacaaatcaaggaatgaagttttcccaaagctgcagtgtgaaaagactataaacagttgattccatacacatgaatgggtttctttgctataggacatccaagtggaataaggattggagatgtgtaaaaaggtttcttgaacgaaagaaggatgacactctgtatggatntagttttcagccccttctgccgcatcacattcttctcctgcactgtctgatgtccaaagtggtagggttgtctcttagcaactgcatgatgagggtgctgtccttgcatgagatctcattca

SEQ ID NO: 12049 - DNA, 186 bp, Homo sapiens
ccaagattcggcacgaggggatcttttagcattggttctgtgtgtctgcctgctgcatacctttgcatctagggcagggccaggcacccaggggtgccgctgaggatccccaaagggaatggaagagggtcggtgtgctgcccggcacatgggcttgtctccccacagtggggagggcctggtcag

SEQ ID NO: 12050 - DNA, 164 bp, Homo sapiens; identical to SEQ ID NO: 2922

SEQ ID NO: 12051 - DNA, 599 bp, Homo sapiens
aagctcggaattcggctcgagtttttcattgcatagactgttaatatgtatataatacaagactatatgaattggataatgagtatcagttttttattcctgagatttagaacttgatctactccctgagccagggttacatcatcttgtcattttagaagtaaccactcttgtctctctggctgggcacggtggctcatgcctgtaatcccagcactttgggaggccgaggcgggccgattgcttgaggtcaagtgtttgagaccagcctggccaacatggcgaaaccccatctactaaaaatacaaaaattagccaggcatggtggtgggtgcctgtaatcccagctacctgggaggctgaggcaggagaatcgcttgaacccggggggcagaggttgcagtgagctgagtttgcgccactgcactctagcctgggggagaaagtgaaactccctctcaaaaaaaagaccactctcagtatctctgatttctgaagatgtacaaaaaaatatagcttcatatatctggaatgagcactgagccataaaaggttttcagcaagttgtaacttattttggcctaaaaatgaggtttttt

SEQ ID NO: 12052 - DNA, 424 bp, Homo sapiens; identical to SEQ ID NO: 3597
  misc_feature 347: n = A,T,C or G

SEQ ID NO: 12053 - DNA, 262 bp, Homo sapiens
  misc_feature 67, 77, 88, 90, 112: n = A,T,C or G
cttacctcaagtcgtgcatttatgatgctaaaacagatcccttctgccccatattccgtcttggcanaatagtgganaacgcaggccncngtttccaggacatggccgtggngggaggcatcatgggcatccaggtcaactgggactgcaacctggacagagccgcctccctctgcttgcccaggtactccttccgccgcctcgatacacgggacgttgagcacaacgtatctcctggctacaatttcaggtttgccaagta

SEQ ID NO: 12054 - DNA, 492 bp, Homo sapiens
tggtacgcctgcaggtaccggtccggaattcccgggtcgacccacgcgtccggttagactgggatccctgtctaccaagcttcactcccgtgcctaccagcaggctctcagcagggttaaagaagctaagcaaaaaagccaacagaccatttctcagctccattctactgttcacctgattgaatttgccaggaagaatgtgtatagtgccaatcagaaaattcaggatgctcaggataagctctacctctcatgggtagagtggaaaaggagcattggatatgatgatactgatgagtcccactgtgctgagcacattgagtcacgtactcttgcaattgcccgcaacctgactcagcagctccagaccacgtgccacaccctcctgtccaacatccaaggtgtaccacagaacatccaagatcaagccaagcacatgggggtgatggcaggcgacatctactcagtgttccgcaatgctgcctcctttaa

SEQ ID NO: 12055 - DNA, 116 bp, Homo sapiens
gggggccgcgcagcaacgcactggtgaccagactgtccccacgccgggaaccaagcaggagacgacaggcgagagaggagccagacagaccctgaaaagaaggacgggttggggcc

SEQ ID NO: 12056 - DNA, 429 bp, Homo sapiens
  misc_feature 80, 221: n = A,T,C or G
tggtacgcctgcaggtaccggtccggaattcccgggtcgacccacgcgtccgggtcagaagagttgtgcacgcagattancaggccaaggtctgagccacagcagcatttttatttcagattttgataactgtttatatgtgttgaaaaccaaaatgacatctttttaaagcttatccataaaaaaaaatagatgtcttttatagtggaaaaacacatggnggaaaaaaatcatctattttgatgcagcatttgataatgataaaacacctcacacctcactctttatagtgcacaaaatgaatgaggtctgggctaggtagaaaaagggtcaatgctatttttgtttttagaatcattaccttttaccagcttttaaccatctgatatctatagtagacacactatcatagttaacatagttaagttc

SEQ ID NO: 12057 - DNA, 484 bp, Homo sapiens
  misc_feature 408: n = A,T,C or G
tggtacgcctgcaggtaccggtccggaattcccgggtcgacccacgcgtccgtggacatcttcgagatcaatgaggcctttgcaagccaggctgcctactgtgtggagaagctacgactcccccctgagaaggtgaaccccctggggggtgcagtggccttagggcacccactgggctgcactggggcacgacaggtcatcacgctgctcaatgagctgaagcgccgtgggaagagggcatacggagtggtgtccatgtgcatcgggactggaatgggagccgctgccgtctttgaataccctgggaactgagtgaggtcccaggctggaggcgctacgcagacagtcctgctgctctagcagcaaggcagtaacaccacaaaagcaaaaccacatgggaaaactcancactggtggtggtggcagtggacagatcaaggcacttcaactcatttggaaaatgtgaacactgatgacatggtat

SEQ ID NO: 12058 - DNA, 518 bp, Homo sapiens
  misc_feature 463: n = A,T,C or G
tggtacgcctgcaggtaccggtccggaattcccgggtgctgattgtcgttctagccattggatttctcctggcgcctctacaaaagtccgtcctggcagctttagcattgggaaacttaaagggaatgctgatgcagtttgctgaaataggcagattgtggcgaaaggacaaatatgattgtttaatttggatcatgaccttcatcttcaccattgtcctgggactcgggttaggcctggcagctagtgtggcatttcaactgctaaccatcgtgttcaggacccaatttccaaaatgcagcacgctggctaatattggaagaaccaacatctataagaataaaaaagattattatgatatgtatgagccagaaggagtgaaaattttcagatgtccatctcctatctactttgcaaacattggtttctttaggcggaaacttatcgatgctgttggctttantccacttcgaattctacgcaagcgcaacaaagctttgaggaaaatccgaaaactg

SEQ ID NO: 12059 - DNA, 445 bp, Homo sapiens; identical to SEQ ID NO: 3600

SEQ ID NO: 12060 - DNA, 332 bp, Homo sapiens
  misc_feature 193, 205, 220, 252, 325: n = A,T,C or G
gatagtttacaggaactctctacagaacagaaatgctttgttgaacacatcctttgtacgaagccattgccctgcaggcagccagctccaattcgaggattttggattgtacctgacattctgggacccacgatgatctgcatcaccagtacctatgaatgcctcatatggccgttattaagtacagtccatncagcgtcttctnccctgctttgtactngagaagatgttgaagtggcagagtctcccctncgtgttctggctgaaaccccagattcctttgaaaagcatattaggaggcattttgcaacgtgttttgcccatncagcatt

SEQ ID NO: 12061 - DNA, 154 bp, Homo sapiens
ccccccccttaaaggggggggaaaacccccttccccttttaggggaaaaaaaaaaaaaagggggaaaaaatttttttttcccaaaccccttttttccgcccaacctttaattttttttaaacaaaaaagggagggttttctttaaccgcggggt

SEQ ID NO: 12062 - DNA, 410 bp, Homo sapiens; identical to SEQ ID NO: 235
  misc_feature 302, 303, 309: n = A,T,C or G

SEQ ID NO: 12063 - DNA, 538 bp, Homo sapiens; identical to SEQ ID NO: 2735

SEQ ID NO: 12064 - DNA, 652 bp, Homo sapiens; identical to SEQ ID NO: 3602

SEQ ID NO: 12065 - DNA, 413 bp, Homo sapiens
  misc_feature 1, 3, 6, 123, 206, 306, 356, 382, 394, 409: n = A,T,C or G
ngngcntggcagcgtggttctgggggtcggtttggccaggtccacaggtgcacagagaagtccacaggcctcccactggctgccaagatcatcaaagtgaagagcgccaaggaccgggagacngtgaagaacgagatcaacatcatgaaccagctcagccacgtgaacctgatccagctctatgacgccttcgagagcaagcacanctgcacccttgtcatggagtacgtggacgggggtgagctcttcgaccggatcacagatgagaagtaccacctgacttgagctggatgtggtcctgttcancaggcagatctgtgaaggtgtgcattacctgcaccaggactacatcctgnaacctgggacctccaagccggagaanatattgttcgtnatcagacaggacatnaaat

SEQ ID NO: 12066 - DNA, 501 bp, Homo sapiens; identical to SEQ ID NO: 234
  misc_feature 56, 431: n = A,T,C or G

SEQ ID NO: 12067 - DNA, 438 bp, Homo sapiens
  misc_feature 271: n = A,T,C or G
gaatgtcctaccttctttaccagatgctttgtggtattaaacatctgcattcagctggtataattcatagagatttgaagcctagcaacattgttgtgaaatcagactgcaccctgaagatccttgactttggcctggccggacagcgtgcactaacttcatgatgaccccttacgtggtgacacggtactaccgggcgcccgaaagtcatcctgggtatgggctacaaagagaaccgttgatatctggtcagtgggttgcatcatgggangagctggtgaaaggttgtgtgatattccaaggcactgaccatattgatcagtggaataaaagttattgaagcagctggggaacacccatcagcagagttcatgaagaaacttcagccaactgtgaggaattatgtcgaaaacagaccaaagtatcctggaatcaaat

SEQ ID NO: 12068 - DNA, 597 bp, Homo sapiens; identical to SEQ ID NO: 3603

SEQ ID NO: 12069 - DNA, 540 bp, Homo sapiens; identical to SEQ ID NO: 3604

SEQ ID NO: 12070 - DNA, 524 bp, Homo sapiens
aatttggccctcgaggccaagaattcggcacgagatttctgtgtgcagtggaactgtcaccgctgttcccagacacacttattctgggtctggagatccgggtgaaggtctcagactatgtacaagaccggattcgggccctacgcgcagctcctgcaggtggcttccagaacatcgcctgtctccgtagcaatgccatgaagcaccttcctaacttcttctacaagggccagctgacaaagatgttcttcctcttccccgacccacatttcaagcggacaaagcacaagtggcgaatcatcagtcccaccctgctagcagaatatgcctacgtgctaagagttggggggctggtgtataccataaccgatgtgctggagctacacgactggatgtgcactcatttcgaagagcacccactgtttgagcgtgtgcctctggaggacctgagtgaagaccccgttgtgggacatctaggcacctcaactgaggaggggaagaaagttctacgtaatggagggaag

SEQ ID NO: 12071 - DNA, 422 bp, Homo sapiens; identical to SEQ ID NO: 3605

SEQ ID NO: 12072 - DNA, 549 bp, Homo sapiens
tggtacgcctgcaggtaccggtccggaattcccgggtcgacccacgcgtccgcgctgtaaaaaagacagaggctgttccctatggcagaaggcaaccacagaaaaaagccacttaaggtgttggaatccctgggcaaagatttcctcactggtgttttggataacttggtggaacaaaatgtactgaactggaaggaagaggaaaaaaagaaatattacgatgctaaaactgaagacaaagttcgggtcatggcagactctatgcaagagaagcaacgtatggcaggacaaatgcttcttcaaaccttttttaacatagaccaaatatcccccaataaaaaagctcatccgaatatggaggctggaccacctgagtcaggagaatctacagatgccctcaagctttgtcctcatgaagaattcctgagactatgtaaagaaagagctgaagagatctatccaataaaggagagaaacaaccgcacacgcctggctctcatcatatgcaatacagagtttgaccatctgcctccgaggaatggagctgac

SEQ ID NO: 12073 - DNA, 172 bp, Homo sapiens
  misc_feature 54, 121: n = A,T,C or G
gcacgtagctaaacttaaggtcagaacagaaattcatgtgctgaacagaatggnttctttttgcagtaccaatccaattgattcctctttttattttcctgcgtccttaccagtcactttnatagtgctaactaacctacactatgggggttattcatgatttaagtatgat

SEQ ID NO: 12074 - DNA, 205 bp, Homo sapiens
  misc_feature 27, 29, 95: n = A,T,C or G
cagagctcagcacgacctcagccatgngnacttctcatcctggccctccttgggcatctcctctctcactgcatacattgtggaaggtgtagggngtgaagtctcacataggaggacctgtgtgagcctcactacccagcgactgccagttagcagaatcaagacctacaccatcacggaaggctccttgagagcagtaattttt

SEQ ID NO: 12075 - DNA, 82 bp, Homo sapiens
  misc_feature 18, 22, 24, 28, 75: n = A,T,C or G
atcatgccctgccttgtncctntnactncccagccccacccctaagtgcccaaagtggggagggacaagggattntgggaag

SEQ ID NO: 12076 - DNA, 66 bp, Homo sapiens
ggccgcccttttttttttttttttttttaaagggtcccccccttttaaaaaaatttttaaattttt

SEQ ID NO: 12077 - DNA, 486 bp, Homo sapiens
ttatagtggggattttattttaagtttgttggttaggtagttgaggtctagggctgttagaagtcctaggaaagtgacagcgagggctgtgagttttaggtagagggggattgtcgtttggaagggggatgcgggggaaatgttgttagtaatgagaaatcctgcgaataggcttccggctgccaggcgtttaatggggtttagtagggtggggttattttcgttaatgttagtaagggtggggaagcgaggttgacctgttagggtgagaagaattattcgagtgctataggcgcttgtcagggaggtagcgatgagagtaatagatagggctcaggcgtttgtgtatgataatgttgcggtttcgatgatgtggttcttggagtagaaacctgtgaagaaaagtaatcctgccaatgccaagctgccaattgttaaggaagtttaaattagaagtattgttttgaatagtcctccctcgtgccg

SEQ ID NO: 12078 - DNA, 438 bp, Homo sapiens; identical to SEQ ID NO: 3606

SEQ ID NO: 12079 - DNA, 506 bp, Homo sapiens
cggcagtgtaggagcgcgtgcccacgaaggagttggccatggagtctatgagctggccgctcaccccgaagtcacacagcttgatctcccctctagagttcacgaggatgttggagggcttcacatctcggtgcatgatctggtgcttctctcggaggtacgccaagccccggagaaccgcgatgctgactttccccaggatctcctcgggaatcctcttggcctctttcagcacctggtccagggagccgccgtccatgtgttccatgcaaatgctgatctccccgtcactgtagaaggccccgtagaagcccacgatgtacggcgagttgcattcgtgcaggacctgcagctcgcggatgatctggttccggatggccggcttgatctcaaggtggatcagcttcctggccatgatgaggccgaggttctgtgctggactttggtgacaccccgccgttgccgtgccagctctgagatccttcgaagtatcgtctttgattcgc

SEQ ID NO: 12080 - DNA, 542 bp, Homo sapiens
caaaaagaaagccccagcgctctagagctcagctgacgggaaagggggtgcgcagcctcgagtttgagagctacccggagctccaagacaggggccggaccatgggaaccccaaagccacggatcctgccctggctggtgtcgcagctggacctggggcaactggagggcgtggcctgggtgaacaagagccgcacgcgcttccgcatcccttggaagcacggcctacggcaggatgcacagcaggaggatttcggaatcttccaggcctgggccgaggccactggtgcatatgttcccgggagggataagccagacctgccaacctggaagaggaatttccgctctgccctcaaccgcaaagaagggttgcgtttagcagaggaccggagcaaggaccctcacgacccacataaaatctacgagtttgtgaactcaggagttggggacttttcccagccagacacctctccggacaccaatggtggaggcagtacttctgatacccaggaagacattctggatgagttactgggtaacatg

SEQ ID NO: 12081 - DNA, 132 bp, Homo sapiens
cccccatttttattaccaacccactttttttcaaagaaaacctaggcggccttttcccccaagattttcccaaggttttaaaatttttttcaaataccgtgccttccaaatccccttccccaattttccccc

SEQ ID NO: 12082 - DNA, 711 bp, Homo sapiens; identical to SEQ ID NO: 3610
  misc_feature 494: n = A,T,C or G

SEQ ID NO: 12083 - DNA, 448 bp, Homo sapiens
gcagccgtggctgagtccagaactactgagacaggatttacatgggtataatgtgaagtcagatatttacagtgttgggattacagcatgtgaattagccagtgggcttttttctttccagggggtgcatagaactcagatgctgttacagaaactgaaaggtcctccttatagcccattggatatcactattttccctcaatcagaatccagaatgaaaaattcccagtcaggtgtagactctgggattggagaaagtgtgcttgtctccagtggaactcacacagttaatagtgaccgattacacacaccatcctcaaaaactttctctcctgccttctttaacttggtacagctctgtttgcaacaagatcctgagaaaaggccatcagcaagcaccttattgtcccatgttttcttcaaacagatgaaagaaaaaagccaggat

SEQ ID NO: 12084 - DNA, 510 bp, Homo sapiens
ctatagggaatttggccctcgaggccaagaattcggcacgagggctaaagagagagttcgtcaggatccttgtgaggatatttctcgtatccagaaaatcagatcaagggaagtagccttggaagcacaaacttcacgttacttaaatgaatttgaagaacttgccatcttaggaaaaggtggatacggaagagtatacaaggtcaggaataaattagatggtcagtattatgcaataaaaaaaatcctgattaagggtgcaactaaaacagtttgcatgaaggtcctacgggaagtgaaggtgctggcaggtcttcagcaccccaatattgttggctatcacaccgcgtggatagaacatgttcatgtgattcagccacgagacagagctgccattgagttgccatctctggaagtgctctccgaccaggaagaggacagagagcaatggtggtgttaaaaatgatgaaagtagcagctcatccattatctttgctgagcccaccccag

SEQ ID NO: 12085 - DNA, 183 bp, Homo sapiens
ataagcagatcacatccagaacaaccccacccgacagaaatgacagctacttcctagagactttaggtgctacagagcagattcatgcgcttaataagaattgagcctcattatcacctaagaaagctgaggaagcatatattaccaagtgcaattaacaagagagtttttattcctataaaa

SEQ ID NO: 12086 - DNA, 68 bp, Homo sapiens
cggccgccctcttttttttttttttttttttctatatttttttatgttttttttttttttcttttttt

SEQ ID NO: 12087 - DNA, 250 bp, Homo sapiens
  misc_feature 89: n = A,T,C or G
ctcaggtgcaaccccctgcgtggtcctctgtggcagccttctctcattcagagctaaaaagaaaactcagtagaagataatggcaagtncagactggggatatgatgacaaaaatggtcctgaacaatggagcaagctgtatcccattgccaatggaaataaccagtcccctgttgatattaaaaccagtgaaaccaaacatgacacctctctgaaacctattagtgtctcctacaacccagccacagcc

SEQ ID NO: 12088 - DNA, 270 bp, Homo sapiens
  misc_feature 26, 41, 242, 262: n = A,T,C or G
gggatattgcagggcaggagcgcttnacctctatgacacgnttgtattatcgggatgcctctgcctgtgttattatgtttgacgttaccaatgccactaccttcagcaacagccagaggtggaaacaggacctagacagcaagctcacactacccaatggagagccggtgccctgcctgctcttggccaacaagtgtgatctgttcccttgggcagtgagccgggaccagattgaccggttnagtaaagagaacggttttanaaggttgg

SEQ ID NO: 12089 - DNA, 238 bp, Homo sapiens
  misc_feature 127, 128, 129, 130, 131, 132, 133, 134, 135, 136, 137, 138,139, 140, 141, 142, 143, 144, 145, 146: n = A,T,C or G
ggttaatgattttttgttcattctgatttgtcattttattatctgttatcggtctaaagtgctaatttacccatttgatttttctgctagacagataacttttaatttttcaaatttggcagacacnnnnnnnnnnnnnnnnnnnntctttccttccagatctgttgcccactgaacagccacccgtccctcactgtcctggtgtccgattgggctggatggtgttggggcatgatgt

SEQ ID NO: 12090 - DNA, 409 bp, Homo sapiens; identical to SEQ ID NO: 3613
  misc_feature 322: n = A,T,C or G

SEQ ID NO: 12091 - DNA, 226 bp, Homo sapiens
  misc_feature 188: n = A,T,C or G
gcctgctggctttctgttgactggcccggagctgtactgcaagacccttgtgagcttccctagtctaagagtaggatgtctgctgaagtcatccatcaggttgaagaagcacttgatacagatgagaaggagatgctgctctttttgtgccgggatgttgctatagatgtggttccacctaatgtcanggaccttctggatattttacgggaaagaggtaagctgt

SEQ ID NO: 12092 - DNA, 247 bp, Homo sapiens
  misc_feature 23, 60, 108, 126, 163, 215: n = A,T,C or G
acagcagctacacagttccaggntacatgcaggacttggaggtggagcaggccctgactncaggggatattgggctgagtctacagcgtgtcttcacagatctgaagnacatggatgccacctggntggacagctgctgaccccagttcggttgcccttcatncagggcatttcctgtgcaacgtagcaggggccctggggcccttttatttctntaggcaagcaggacctgggattatggtggata

SEQ ID NO: 12093 - DNA, 260 bp, Homo sapiens; identical to SEQ ID NO: 826

SEQ ID NO: 12094 - DNA, 181 bp, Homo sapiens
agctgagcatgcaaatgattccctagcacccattactttaaataccattactgcagccacacgccttggaggtgaagtgtcctgcttagtagctggaaccaaatgtgacaagaaccttttgcccagagtagcagccaaacttgaggttgccccgatttctgacatcattgcaatcaagtca

SEQ ID NO: 12095 - DNA, 446 bp, Homo sapiens
ccaagaattcggcacgagtgacgtcctgcacagcgacaagaagctgactttggtttttgaattctgtgaccaggacctgaagaagtattttgacagttgcaatggtgacctcgatcctgagattgtaaagtcattcctcttccagctactaaaagggctgggattctgtcatagccgcaatgtgctacacagggacctgaagccccagaacctgctaataaacaggaatggggagctgaaattggctgattttggcctggctcgagcctttgggattcccgtccgctgttactcagctgaggtggtcacactgtggtaccgcccaccggatgtcctctttggggccaagctgtactccacgtccatcgacatgtggtcagccggctgcatctttgcagagctggccaatgctgggcggcctctttttcccggcaatgatgtcgatg

SEQ ID NO: 12096 - DNA, 563 bp, Homo sapiens; identical to SEQ ID NO: 3616
  misc_feature 2, 529, 554: n = A,T,C or G

SEQ ID NO: 12097 - DNA, 439 bp, Homo sapiens
tggatcccccgggctgcaggaattcggcacgagcacaaaccaagaaaaggtggtgattgtgagccatcttcccatttacccggacgcctctgacaatgtgtgcctggcctggaactacagagatgccctggcagtcatttggtctcatgagtgtgtggtgtgtttctttgctggtcacacccatgatggtggctactctgaggatccttttggtgtataccacgtcaacctagaaggagttattgaaacagctccagacagccaagcctttggcacagttcatgtctatcctgacaaaatgatgttgaaagggagaggcagagttccagatagaattatgaattacaagaaaggaagagccttccattgttagtctaatttattttaacttgataaaaaatgagctttgtgtttgtccctcctaaacaaaaaaataaaa

SEQ ID NO: 12098 - DNA, 629 bp, Homo sapiens
tggtacgcctgcaggtaccggtccggaattcccgggtcgacccacgcgtccggggactgcggcgcttgcacgtcaacgggaggtgtgagcccaaaggtctggacccagaaatgggacgtcggtcatcagatactgaagaagaaagcagaagcaagagaaaaaagaaacaccgtagacggtcctcctcgagcagttcttcagatagtagaacatacagccgaaagaaaggaggaaggaaatcaagatcaaagtcaagatcttggtccagagatcttcagcctcgttcacattcttatgatagaagacgcaggcatcgatcaagcagtagctcttcttatggctccagaaggaaacgaagtcgaagtcgttcaaggggtcgagggaaatcctatagagttcagaggtctaggtcaaaaagcagaacaagaaggtccaggtcaagacctcgtctccgttctcatagtcgtagcagtgaaaggtccagtcacagaagaacgcgtagtcggtctcgggatagagaacgacgtaagggcagagataaagagaaaagagaaaaggagaaggataaagggaagggacaggaattacataacatcaaacgtggggaatctggaaacatcaaagctgga

SEQ ID NO: 12099 - DNA, 242 bp, Homo sapiens
gtgtggtctggctataaatttagactgttgcttgaaagaagcgaaaaacctccccttcatagacttccttcttcccatcccccctggcagccgctttgttcctctagccttgtaaaattttctctgtataaaacaggaacatcagccaaacatgtggacttccccactttccattcattagaagaatgcattatttcaaaatctcctgggagcatttaaatgcaaattttgtcaagaaagca

SEQ ID NO: 12100 - DNA, 268 bp, Homo sapiens
  misc_feature 194, 205, 221, 222, 223, 229, 234, 245, 260, 261, 265: n = A,T,C or G
gtctggacatgtttgagcacatcagcctcatgaccttggacagtctacagaaatgcatcttcagctttgacagccattgtcaggagaggcccagtgaatatattgccaccatcttggagctcagtgcccttgtagagaaaagaagccagcatatcctccagcacatggactttctgtattacctctcccatgangggcggcgctnccacagggcctgccgnnntggtgnatganttcgcagacgntgtcatccggggagnnggcngtc

SEQ ID NO: 12101 - DNA, 201 bp, Homo sapiens
acaagatggcggcggcagctgtacagggcgggagaagcggtggtagcggaggctgtagtggggctggtggtgcttccaactgcgggacaggaagtggccgtagcggcttgttggataagtggaagatagatgataagcctgtaaaaattgacaagtgggatggatcagctgtgaaaaactctttggatgattctgccaaaa

SEQ ID NO: 12102 - DNA, 350 bp, Homo sapiens; identical to SEQ ID NO: 828
  misc_feature 62, 73, 130, 306, 313, 322: n = A,T,C or G

SEQ ID NO: 12103 - DNA, 404 bp, Homo sapiens
  misc_feature 113, 168, 229, 239, 319, 344, 368, 395: n = A,T,C or G
ggaaataagtcaaagcattgtttatttatgacatatttacatatttacaaaactgattttactcaatacatcatcctgcgtaatatcataaaatgaacaccatatcctgggantaaaaatccatatttcttaataatttatgtatagcccaacttttagaacatagantattatcaatttggcttcccaaactacaaagtcctgtttataattttttctagccaaggancagagtaggntcaacaggcatattaaagtaatttagttaaccctgaggtaattactaacttggcataattttggaatggggtatatatancacactttccatctggcacttaggntacttattactattcacactaccnttttggtatttatccacctcaattttncaacttcct

SEQ ID NO: 12104 - DNA, 506 bp, Homo sapiens
  misc_feature 315, 378, 397, 404, 412, 417, 426, 437, 443, 451, 463, 500: n = A,T,C or G
acaaaggacatttcatttttaatcactcaaaaatgaaaaaggtttggacaatgtcaaattccactcaccataatgctatagttatacattaaatataattactatctatacatatgcaaaaatataaagttctatttcatacaataaaaccctttatagaaaccattttaaaattaagcagaacttctcaacattaatatgtgaggtctaagtccttctaaaggtttctttaaaggtttttaaacaaaatgctaaacctaaaaacattgtcctgtcagttcccaaattaaatctacttaggaacaaaaacaaaantttataggctcgggtcacatactacttaaataatattgttcagggcatctctaaaatcctccntggttttcaagtatggggnatagggnctcaaatnttccncattacagnactaaacggtnggggtntttggggnaggctttggtgncctatgggcccctttttattatttggtggcttcatanggttgg

SEQ ID NO: 12105 - DNA, 470 bp, Homo sapiens
gacatttggaagagtcagtgacttggggcaattcatccgagaatctgagcctgaacctgatgtaaggaaatcaaaaggatccatgttctcacaagctatgaagaaatgggtgcaaggaaatactgatgaggcccaggaagagctagcttggaagattgctaaaatgatagtcagtgacattatgcagcaggctcagtatgatcaaccgttagagaaatctacaaagttatgactcaaaacttgagataaaggaaatctgcttgtgaaaaataagagaacttttttcccttggttggattcttcaacacagccaatgaaaacagcactatatttctgatctgtcactgttgtttccagggagagaatggggagacaatcctaggacttccaccctaatgcagttacctgtagggcataattggatggcacatgatgtttcacacagtgaggagtctttaaaggttaccaaa

SEQ ID NO: 12106 - DNA, 242 bp, Homo sapiens
  misc_feature 8, 16, 26, 48, 50, 61, 67, 73, 78, 85, 101, 111, 114, 115,117, 118, 130, 135, 154, 159, 163, 171, 175, 184, 191, 209,221, 231, 232: n = A,T,C or G
aaggagcntaaagatnataatattgngaagatgatggatgttatttananagaaaataaantctacntggctnttgantttgtgnaccacgatctgaaganattgatgganganntnngctgttactggnattantattactctgatgaagagntatcngttntagctgtntganggtgtagcnttatgcnattttaatcgggtgctcnaacgagaggttnaagctgagannttgcttatta

SEQ ID NO: 12107 - DNA, 555 bp, Homo sapiens
aaaaggggtaaacagtgataccatttactgaattggagttactattaaaattcaaaaactgaacatattcatttaaccacaagccagtcttagttttaaatcaggactgcccaacaaaatattctgtcagtcattcatgatctgaattctggtgtatgagatctattaaaggatggtacacataaaaaagtcatgagacatttctgttttgtaataaataaggcagtggccaattattactcattagtagcttttttgagataagctattaagtctgccctttcttccttcttcttaatgccgacaaagatcatttttgttccagggatgtacttcttgggattctccaaatactccatcagtgtatcctctccccagatgatgcctttgttcttattggcggctgtgtaagagtatccaggggcctgacctgtcttccgcccaaagagaccatggagatttggcccagtcttgtgcttgcctcccttttcaacggtgtggcactgggaacactccattataaaaattcttcttgcctttctcaacatcacccat

SEQ ID NO: 12108 - DNA, 461 bp, Homo sapiens
tggtacgcctgcaggtaccggtccggaattcccgggtcgacccacgcgtccgaattaagaggaaaatagaagttgcttttaggggtttctgacatatattctggatactatccgaggtaattttgaagtttaatataaatgctcatatcaaatgaatatagaactaatattgtcgggaacacctaatagaaaggaatactattatagcaaatcacagaatgatagactcaagcataaaacttggcagttttatctgcttcaaaatgccattgatcattattcctgtattttctctgaaactgattataaaaaccaatgtccagctactcttttgtttttgacacttgaagaaatggagatcgatttgatttgtttataagcagacacactgcaatttacaaagatctctttacggttttataaaattatcttccagtttgtacatttatatggaattgttc

SEQ ID NO: 12109 - DNA, 97 bp, Homo sapiens
  misc_feature 95: n = A,T,C or G
gaattctaaaaaatatttttttctatgaaattactagtgcccagctgtagaatctaccttaggtagatgatccctagacatacgttggttttgangg

SEQ ID NO: 12110 - DNA, 514 bp, Homo sapiens
  misc_feature 239, 369: n = A,T,C or G
tggtacgcctgcaggtaccggtccggaattcccgggtcgacccacgcgtccgaggacttggaggccctgatgtttgatcgctcctttgtggggaagcagttctcagcaaatgacaaagtttacactgtggagaaggccgataactttgaatacagcgacccagtggatggaagcatttcaagaaatcagggcttgcgcctcattttcacagatggttctcgaatcgtcttccgactgancggcactgggagtgccggggccaccattcggctgtacatcgatagctatgagaaggacgttgccaagattaaccaggacccccaggtcatgttggccccccttatttccattgctctgaaagtgtcccanctgcaggagaggacgggacgcactgcacccactgtcatcacctaagaagacaggcctgatgtggtacgtccctccacccccggacccatccaagtcatctgattgaagagcatgacagaaacaaaatgtattcaccaagcatttt

SEQ ID NO: 12111 - DNA, 160 bp, Homo sapiens
gccgccctttttttttttttttttttttttttttttttttttttttttttttttttttcttttttttttttttttttttttttaaaaaaaaaaaggtgtttttttcccccccccccaaaaaaaaaaaaaaaaaggggggcgggggggggggggttttttt

SEQ ID NO: 12112 - DNA, 221 bp, Homo sapiens; identical to SEQ ID NO: 47

SEQ ID NO: 12113 - DNA, 238 bp, Homo sapiens
ctcaattccaaggcattggaaaaagagaggaacaagcagaagatgcctgcaggtatcactttgatcctatgtgggagcgactgaaaatagaatgagcttggttaagcacctctcctttgcccttcaccctgactcctgtcactgtctccatccccaaataaagctgaaatatttttttaagttagctgccgagaaaacattttgcatgaaggataaagttctgttaaaatacatcctt

SEQ ID NO: 12114 - DNA, 353 bp, Homo sapiens
tggtacgcctgcaggtaccggtccggaattcccgggtcgacccacgcgtccgataaattcatgattagaagaattatactgtttttcttgcgcaaataatacttaatgcagatgttcactctcacagtgatgttggaaagcatattttatgcaggctaaacactatttctgtattagatatttaaatgcgtgaggataaattctaattgctttttgttctaaaacagaaacatagaagaagcattatccccagcttgtataaaatgtctgctgcaactgaattcatgatagttcatgaaaactgaaaatcattccaattttgtaaaactgctgctactggttttatcaataaa

SEQ ID NO: 12115 - DNA, 290 bp, Homo sapiens
  misc_feature 236, 265, 269: n = A,T,C or G
gaacaatgatggtgcacaaaggcttagatttgccttgtctcaaaataaggaattttgtagtggttttcaaaaataattcaacaaagaaacaatacaaaaagtgggtagaattacctatcacatttcccaatcttgactattcagaatgctgtttatttagtgatgaggattagcacttgattgaagattcttttaaaatactatccagttaaacatttaatatgattatgattaangaatccattaggctacagacctgacaatngagnctcaataaaatgattgtttta

SEQ ID NO: 12116 - DNA, 247 bp, Homo sapiens; identical to SEQ ID NO: 120
  misc_feature 178, 207, 212, 246: n = A,T,C or G

SEQ ID NO: 12117 - DNA, 98 bp, Homo sapiens
actttatcacatctccacatgtacaatacagggaaccagttgcattgtgtgccaatggatgaagttttttttgtttgtttgtttttgttttttttgag

SEQ ID NO: 12118 - DNA, 262 bp, Homo sapiens
caaggggatgatttgccgacatgtttgagaaccccctaacctctaaccctcattgctgtcttgccccagtttggggtgccaagatggaagtcacctttctgggctttctcctggagatagctggggcttatgggtggctttcaaggctggggcatggcaaatcaggggccagagagcaggggagcttgggactcaggtctgtaactgcccagccccttttctctgctcttgtttcactccaccatcactcactcactcccca

SEQ ID NO: 12119 - DNA, 343 bp, Homo sapiens
ggccgcccttttttttttttttttttttttttttttttttgggtttttttttgttttaacaacgggggccaaaatttattttccctagggggccaattttggttgcgcggaaaaaccctttggggaaaggcaaaaatatttgggggggggggggaaaaaaaaaattgggcccccaaattttgggggggttttttttttaggggccgttttttcccccctgggggggaaaccgcccccaacccccgggtttttttttttttaaaaaaaaaacccaaacccccggtttttttttaaacttccccaaatttggaaaaaattttgggggggaaaaaaaaaaggggcc

SEQ ID NO: 12120 - DNA, 579 bp, Homo sapiens
ccaagaattcggcacgaggatgtgacatttagatacattgcaatcatgacaaatatttggatttcaaaatgacgtgtgagccatttatatttttgttgtgctttgttatcttatgggctcccataagataacaaggcttcaacactatggcttgaaaatgttttgatctgaaaggtatattagggaacacacagcataatcctaccactttgcttctgtctggtgaaatgtcaattgtttcctctctctgagcaccagctgtccaaatggcatgggaaggggcagtggaggggaagagaatgaaaatgagggaggttctaagaaggtggcaaggaattgggatgcaaaatcctgtgactgcctctcacagatttctggaatcttgttattatgtcagcttttgttttatccactgttattggtagtaagtggaacacactgggtaaatacgtcccaagttattcctttacactatacagtttttttcagggctgtcccaccacccccaatcccatttgaaatcaaatatagatgttatttaagcataaaagagtcaggaagccctatgctccccatctg

SEQ ID NO: 12121 - DNA, 340 bp, Homo sapiens
  misc_feature 9, 63, 334: n = A,T,C or G
aactgagtnatttaaagtatgaaactacagtgttagcagagatgtgaagcacaggcacgctanacattactgtgggagtttcatgaagccacttgattttttataatctcctaaacaatcatattacattgtattcaacttagtagcatgattccttacttttctggttttaagtctctataaattattcccagggctatgtagatggtctaaagcaagtgcaagttcagccaagtaggaatttgacatcttcttctgtgaaccatcaccctaaaataaaccaataatttttcctaaatttattttctttttgtggccggtaatttttaaggtncccctc

SEQ ID NO: 12122 - DNA, 607 bp, Homo sapiens; identical to SEQ ID NO: 3622

SEQ ID NO: 12123 - DNA, 584 bp, Homo sapiens
ccaagaattcggaacgaggggtcatgaaaaaaaattgagaaacattacctcatacacaatgaatgaatcagaggacagacacgggaatggcacgactgtgcagtgtgttactaggaaaaaagttcagaatcactgttctagagagcttcatttccattggttttaaaacattattctcatgtagaacagtgttcgggtctcatactgttaatgttaatacgtaacaatgttcatgttaacaggcacctgttaatattaacagataatgttactgttaacaggtaagagaaattgctctaagtgcccaaactttatatacttcagttttaatgacaagcatttcagaaatataagagcggcagccacaccaaccagtttttccagatatcttgatgtgaacctgaccctactcctttagaagacagcctgttcatttttaaatagctttaacccaaactgttctatgaccattgtttcaagagacattaacacagttctgtaaatagaagtgtctatggacaaataagtctgggaaatgtggcatactgtatccttttcttaacatttgcatattaaagactctg

SEQ ID NO: 12124 - DNA, 529 bp, Homo sapiens
tcactatagggcgaattgggtaccgggcccccccggagtgcaaaggaggcgacctgcaacagaggagtcccggtcaccagcaaccatgacggaccagcaggctgaggccaggtcctacctcagcgaagagatgatcgctgagttcaaggctgcctttgacatgtttgatgctgatggtggtggggacatcagcgtcaaggagttgggcacggtgatgaggatgctgggccagacacccaccaaggaggagctggacgccatcatcgaggaggtggatgaggacggcagcggcaccatcgacttcgaggagttcttggtcatgatggtgcgccagatgaaagaggacgcgaaagggaagagcgaggaggagctggccgagtgcttccgcatcttcgacaggaatgcagacggctacatcgacccggaggagctggctgagattttcagggcctccggggagcacgtgacggacgaggagatcgaatctctgatgaaagacggcgacaagaacaacgacggccgcattgac

SEQ ID NO: 12125 - DNA, 548 bp, Homo sapiens; identical to SEQ ID NO: 841
  misc_feature 231: n = A,T,C or G

SEQ ID NO: 12126 - DNA, 463 bp, Homo sapiens
  misc_feature 15, 176, 180, 259, 304, 404: n = A,T,C or G
ggactcgcaggtgtncggcgacgagggctggtggaccgggcagctgaaccagcgggtgggcatcttccccagcaactacgtgaccccgcgcagccttctccagccgctgccagcccggcggcgaggaccccagttgctacccgcccattcagttgttagaaattgattttgcggantcancttggaagagattattggcatcgggggctttgggaaggtctatcgtgcttttggataggggatgaggttgctgtgaaanagctcgccacgaccctgatgaggacatcagccagaccatagagantgttcgcaagaggccaagtcttcgcatgtgaagcaccccaacatattgcctaagaggggtattctgaagagcccaactctgttggtcatggagtttgtgntgagaacctttgaatagagtgtattggaaaagattccccagcatctggtgaatgggcgt

SEQ ID NO: 12127 - DNA, 484 bp, Homo sapiens
tgagttctaaagttcctgttgcttcagacaatggatgagcaatcacaaggaatgcaagggccacctgttcctcagttccaaccacagaaggccttacgaccggatatgggctataatacattagccaactttcgaatagaaaagaaaattggtcgcggacaatttagtgaagtttatagagcagcctgtctcattggatggagtaccagtagctttaaaaaaagtgcagatatttgatttaatggatgccaaagcacgtgctgattgcatcaaagaaatagatcttcttaagcaactcaaccatccaaatgtaataaaatattatgcatcattcattgaagataatgaactaaacatagttttggaactagcagatgctggcgacctatccagaatgatcaagcattttaagaagcaaaagaggctaattcctgaaagaactgttttggaagtattttgttcagctttgcagtgcattggaaca

SEQ ID NO: 12128 - DNA, 443 bp, Homo sapiens; identical to SEQ ID NO: 843
  misc_feature 215: n = A,T,C or G

SEQ ID NO: 12129 - DNA, 174 bp, Homo sapiens
tggtacgcctgcaggtaccggtccggaattcccgggtcgacccacgcgtccggtcccagctactcatcggggctaggcaggaggattgcttgagcccagaggtcgaggctgcagtgagccatgatcacaccactgctgcactctagcctgagtgagagagcaagaccctgtctc

SEQ ID NO: 12130 - DNA, 129 bp, Homo sapiens
tatttatttccacataaggaaacagattgagaggctaaataccctgcccaatacatacaactgtaagtggagaagctgtattccaacccatattctcctcaatatccctgtagggacaagcaactctga

SEQ ID NO: 12131 - DNA, 522 bp, Homo sapiens; identical to SEQ ID NO: 3626

SEQ ID NO: 12132 - DNA, 497 bp, Homo sapiens
gaagctggtacgcctgcaggtaccggtccggaattcccgggtcgacccacgcgtccgagaaaacacatgaaaccctgagtcacgcagggcaaaaggcaactgcagctttcagcaacgttggaacggccatcagcaagaagttcggagacatgagttactccattcgccattccataagtatgcctgctatgaggaattctcctactttcaaatcatttgaggagagggttgagacaactgtcacaagcctcaagacgaaagtaggcggtacgaaccctaatggaggcagttttgaggaggtcctcagctccacggcccatgccagtgcccagagcttggcaggaggctcccggcggaccaaggaggaggagctgcagtgctaagtccagccagcgtgcagctgcatccagaaaccggccactacccagcccatctctgcctgtgcttatccagataagaagaccaaaatcccgctgggaaaaacccaggccttgaca

SEQ ID NO: 12133 - DNA, 510 bp, Homo sapiens
tggtacgcctgcaggtaccggtccggaattcccgggtcgacccacgcgtccgcggacgcgtgggcggacgcgtgggtgggaatgaccctgccaatggcgagccaagccgggctgtgctggatgccctgctggagggcaaggcccagtggggggagaatcttcaggtgactctgatccctactcatgacacggaggtgactcgtgagtggtaccaacaaactcatgagcagcagcaacaactgaatgtcctggtcctggctagcagcagcaccgtggtgatgcaggatgagtccttccctgcctgcaagattgagttctgaaagagccgccctcccttccccaaggatccactcccccagctcctttagagaatggctactgctgagtcctttggggttgagggagatgggagctagggggaggggagggagatgtcttgttgtggggacttgggctgggctaaatgggaggggttgtccctccccatcatccattcctgtgaggtgtctc

SEQ ID NO: 12134 - DNA, 258 bp, Homo sapiens
  misc_feature 22, 101, 213: n = A,T,C or G
gtgtccgcagcttctgcctggnacgccgccgcctataagctaccaggaggagctttacgacttcccgtcctgcgggaagtggccgggcacgatcgcaaggnagcgcagaagcttctcaatggccagcgccagctgcagccccggcggcgcactcgcctcacctgagcctgggaggaaaattcttccaaggatgatctcccactcagagctgangaagcttttctactcagcagatgctgtgtgttttgatgttgacag

SEQ ID NO: 12135 - DNA, 277 bp, Homo sapiens
ggccgcccttttttttttttttcccccctaaaaaaaaacgggggtttttttttttcaaaaacaagggggaggggttttattaaaaaaaaggagggatttttttaaaaaaaaggggggcccttttttgcgggaaaaaaggggtttcccaagacccaaaaaaattgatcccccccccagaaactttttgaaaattaagggggttttttaaacgggttagaattttttttgcccttgccccttttggggaccctaaaccaaaatttttttaagtttttca

SEQ ID NO: 12136 - DNA, 268 bp, Homo sapiens
ggccgccctttttttttttttttccccccccaaaaatttttaaaaagcccttttttttaaaaaacctttttttaaaaagggaatttttaaaaaatttaaaaaattttttttaaaaaaaattgcccctgggctttttttaagggccctttttttttaaaaaaaaaacccttttttttaaaaaacccaaaaatcccccaagggggttttcctggggttaaaaaagggccaaaaaatttttggtttggccttttctttaaaaaaaaagggg

SEQ ID NO: 12137 - DNA, 258 bp, Homo sapiens
  misc_feature 35, 86, 123, 139, 153, 154, 155, 156, 157, 158, 159, 160,161, 162, 163, 164, 165, 166, 167, 168, 169, 170, 171, 172,173, 217, 241, 257: n = A,T,C or G
ctgagctccttaaccattccatatgaagaggatgnggaggaagaagaaaaagaagagacatatgatgatattgatggttttgactncccaagttgtggttcccagtgcagacccactatcttncctgggagtgtggggntaaaagagcctacnnnnnnnnnnnnnnnnnnnnntatttatgaagtcttaccagatgaagagcatgatctagagaggntgagagtggcactcgacgaaaagngtagactataccattnt

SEQ ID NO: 12138 - DNA, 248 bp, Homo sapiens
  misc_feature 2, 19, 42, 126, 129, 147, 157, 183, 198, 228, 246: n = A,T,C or G
cnacgatggcctgctgggngacaatcagatcatgcccaaganaggcttcctgataatcatcctggccataatcgcaaaagagggcgactgtgcccctgaggagaaaatctgggaggagctgagtgngtnagaggtgtttgagggganggaagacagnatcttcggggatcccaagaagctgcncacccaatatttcgngcaggaaaactacctggagtaccggcaggnccccggcagtgatcctgnat

SEQ ID NO: 12139 - DNA, 648 bp, Homo sapiens; identical to SEQ ID NO: 3627

SEQ ID NO: 12140 - DNA, 526 bp, Homo sapiens
gagagaccacattcacataacttttattacaatattcattattgttaatctcttaccgtgccttataaattaggctttatcacaggtatgtgtgtaaaggaaaaagcatggaatatatcgggtttggcactatcccgggtttcagatatccactgggggtcttggaacatattccccatggattactgtgggatcctgtgcttgaaaattacgtatttattatcttcagtataatgtgttatgggggtagaaacttcattgttgtgttcaccaatgtatctcaagctggtacacagtattcaacaaatatctgctgaatgaatgaaacgtattgctttattatttggttgttcctcttatcaatattagttatcttctagaatgtggttttgctttcagttctactttgatattaatactgtcaccatcattttttgttcatgaaggcttgtctacttttgcctgtatcttaatttttactctcagtttgtgtttctctattccaagcagcaaatgttgcatatat

SEQ ID NO: 12141 - DNA, 572 bp, Homo sapiens
  misc_feature 492: n = A,T,C or G
tggacagcttaccggtctgcaagactccctggggggcagtgctgactatggagcgggaggggggcggcgcggccttgttgccactccgtgcttcggcagccaggcgcctgatgtaagcgtcccccacacacagcaagatgttctcgggcttgatgtccgtgtggatgatcttgcacttggtgtggaggtagtccaggccgtgcagcacctgcctcacgatgctcttcacgcagggcacgggcaggccctggtagttggacttgatgatccatttgaggagctggtggcccagcacctccagcaccatgcacacatggactccattgactcctgagatcctgaagtcatcaatgagctggacaatggtctctcttttggggtcactggggtcgctgtcccggacacatttcaggagcttgatctcatccacagctgtctccgtgtaatgccccgaactcttcaccactttgagggccacaaagcgcttctcgnattgtcccagcagagccagacggtggagaagtggccccagccagtttgcgcaccacgtggtacccgccaatgaacacgtc

SEQ ID NO: 12142 - DNA, 622 bp, Homo sapiens
caacacatgaacctctggctagaggacatattcacagatagaacataactgtaacatatatgaaaggcttctgggacttgaaatcaaatgtttgggaatggtgcccttggaggcaacctcccattttagatgtttaaaggaccctatatgtggcattcctttctttaaactataggtaattaaggcagctgaacagtaaattgccttctagacactgaaggcaaatctcctttgtccatttacctggaaaccagaatgattttgacatacaggagagctgcagttgtgaaagcaccatcatcatagaggatgatgtaattaaaaaatggtcagtgtgcaaagaaaagaactgcttgcatttctttatttctgtctcataattgtcaaaaaccagaattaggtcaagttcatagtttctgtaattggcttttgaatcaagaatagggagacaatcaaagaatatcttaggttggagatgacagcaatatgattgatttgaagtggaaaaagaaattcaggtaatgttaattaaagtaagattaatcgctgaatggttgaaaatgtcacctagcagataaggatactatctggcatggtaatatggcgtgccctgtgagaattc

SEQ ID NO: 12143 - DNA, 330 bp, Homo sapiens
atccgtatgcaggacccgaacccctacagcttccagtcagacgtctatgcctacggggttgtgctctacgagcttatgactggctcactgccttacagccacattggctgccgtgaccagattatctttatggtgggccgtggctatctgtccccggacctcagcaaaatctccagcaactgccccaaggccatgcggcgcctgctgtctgactgcctcaagttccagcgggaggagcggcccctcttctcccagatcctggccacaattgagctgcttcaacggtcactcccccaagatttgacgggagtgcctccggaaaccctcctt

SEQ ID NO: 12144 - DNA, 609 bp, Homo sapiens
gaatttggccctcgaggccaagaattcggcacgaggtcgggtctgaaagtctgtggggctttgacagagaagcagcgttccagggactccgttcccgccacccgttcagcaaccctctacacctggacccgacctcctcgccttggaggaagaatataagcgtttaaatgcagaattgcaggcaaaaacagctgacgtggttcaacaagctaaggaaataataagagatcggcaagaagtacgatctaggcctgtttcaacacaaatgaaatcatgtgatgacgaagatgattacagtttaagaggtctgttaccatctgaagggatagttcatcttcattcagaaactaagccaaagaccaaaaacattgatcctgtaaacaaggttcaaaacaaattacactctgcaaataaaggaaggaaaacaaattcaagtgttaaattgaaatactctgatgtccaaactgccgacgatgttgccattccagaggatttctcagacttttcccttgcaaaaacaattagcaaaattgaagggcaactggaggaagaaggcttacctgaatatatagatgatattttttctggtgttagtaatgacattggaac

SEQ ID NO: 12145 - DNA, 544 bp, Homo sapiens
gaacaaaataaagctttatttgaactccctcccctacagatcattcagatgcccgggaccatgtccaggttcctctcagcaacatggaaagctaagccatttcacaaacgcacaactgtagctacactacagccccccatgcccagggcacagctttgttgctaagcctgtaacaaaagaccaccactcagtatttgtgtaccctgcagccaacaccacctcctgggcttcacaggttcactcacccaagaggccagcacaaccacgaccgagtgggtactcagtggcccagacaccccccgaacactggcactgcacaaggccctgaagggtagactgtggggcaaagaggacaaactctccctcccctaagggacccggctcactgggcctccttcccctgccaaccgccagcccctgcatgcctagcagggaggtaagcacccactggcgtcgtgatttccattatcttgctaatgttgacagcacctaagtcacattaaaacaaagagagactggatccagacctccaagtctcatcatt

SEQ ID NO: 12146 - DNA, 191 bp, Homo sapiens
ctcgagccgggggagcttcaggaggacagcgggctgtgcgtgctggcccgcctctctgagatcgacgtctccagtgagggtgtcaagggggccaagagcttctttgaggccaaggtccaggccatcaacgtgtccagccgcttcgaggaggagatcaaggcagagcaggaggaaaggaagaagcaggcgga

SEQ ID NO: 12147 - DNA, 262 bp, Homo sapiens; identical to SEQ ID NO: 2509
  misc_feature 186, 188: n = A,T,C or G

SEQ ID NO: 12148 - DNA, 326 bp, Homo sapiens
ggccgccctttttttttttttttaaccaaaaggggtttttggaaagggtccccccctcttttggcccaaaagggttttaagggcccctccccccaaaagaacccccctttggaaaccctggttttcccccgggggggggggaaaaaaaaaggggaccccccacccccaaaacccccggggggggcggggtaaaaacccgggggatttttaaacccccgggggctttaaacacccaaaaagaagaatgggggcttttccccaagggtttttttttggggttcccttttccccttttgggaaaagggaaaaagaaaacctttggaaaa

SEQ ID NO: 12149 - DNA, 271 bp, Homo sapiens; identical to SEQ ID NO: 852
  misc_feature 114: n = A,T,C or G

SEQ ID NO: 12150 - DNA, 330 bp, Homo sapiens
tccccagtgccttttcagagtggcagaatcacaccaccccgaagagccccttcaccagatggcttctcaccatatagccctgaggaaacaaaccgccgtgttaacaaagtgatgcgggccagactgtacttactgcagcagatagggcctaactctttcctgattggaggagacagcccagacaataaataccgggtgtttattgggcctcagaactgcagctgtgcacgtggaacattctgtattcatctgctatttgtgatgctccgggtgtttcaactagaaccttcagacccaatgttatggagaaaaactttaaagaattttgag

SEQ ID NO: 12151 - DNA, 261 bp, Homo sapiens; identical to SEQ ID NO: 853
  misc_feature 48, 55, 150, 169, 213, 222, 239, 257: n = A,T,C or G

SEQ ID NO: 12152 - DNA, 237 bp, Homo sapiens
gcaggagctggagaagtggctgaagaaagagccagaggcctttgactggtccccagtggtgacctatgtgtgtgatcttgaagggaacagagtcaagggtccagagaaggaggagaagttgagacaggcggtcaagcaggtgctgaagtgtgatgtgactcagagccagccactgggggccgtccccttacccccggctgactgcgtgctcagcacactgtgtctggatgccgcctg

SEQ ID NO: 12153 - DNA, 215 bp, Homo sapiens; identical to SEQ ID NO: 854
  misc_feature 63, 75: n = A,T,C or G

SEQ ID NO: 12154 - DNA, 551 bp, Homo sapiens
tggtacgcctgcaggtaccggtccggaattcccgggtcgacccacgcgtccggaaacttactgccttacctaaaagcagcgcagtcaggatattggtaggtcgggggcggctttggaaacccttaagtttacaagcatgcgcggacttgagtgctcattaggtcgccgggcgtccacgtgcagccctggaccctgaaccccggcgtgcgtgggccgtgggccctcggggaaaggttccgtgcactcggggactccggtgaagcctgttcagccgtctgtgtcatgtggccatcttgagtctactctgtcgctcttgtgccctagcaccccgagaaccgtcagtttgagccagatggaagctgagctgaacacattacgatggatgatggaaacataagactatcaagaaatccaagtggtaatgggcgaagtttattcagcatccggcaatggacttatcgtagttggggaaacgggtgttccgaataatatcctggaagttatcaggacacctattttaaatataggcctgaattttgtaaagtaatatt

SEQ ID NO: 12155 - DNA, 430 bp, Homo sapiens
tggtacgcctgcaggtaccggtccggaattcccgggtcgacccacgcgtccggcatggcccagggtgttgaggccagcggtgagagccgtgttagccaagacatggaactgtgttctcaagggttatgtggggcgtgggctctccatagtgtgtatgaaaagcttgttgactctagcggctcagagaggactttgctgggtttctttctgtgaatatctccgtgctgaccatgctggaattggatgattctgcaattcgggacctactgcaggggtccgtttagtaacgtcttgtctgtgatctttgttcttgacctctagaccccaagatgtgaacagtgcacgtgttaatgtcatctttgctcatgtgttataagccccaagttgctgtatattttcacaagtatgtctacacactggtcatgatttt

SEQ ID NO: 12156 - DNA, 183 bp, Homo sapiens
aaacaaagttttggtacaacaagatgcgttaatcttatccaagctctatctattgagtcaatgtattgtcttgagagtatgctaaaactgttgtatgttccttaaccgtgggttttcattgtcttgagatgagaattcatgctttcatattgccagaattctggaagtgttcacagctagggg

SEQ ID NO: 12157 - DNA, 195 bp, Homo sapiens
  misc_feature 144: n = A,T,C or G
acaacgtgcaactgacactcccacccagtctctgctccacctttcagcccacgtcacgtgtagtgtccattttgtgaagccctgttgtgccacagagtgtagccaggtccccctgcagctagtcctagtgaacctcaccccgangccctgcatgggccagcccctccatctgtacttggtccaactgcaactcat

SEQ ID NO: 12158 - DNA, 279 bp, Homo sapiens
  misc_feature 99, 151, 152, 154: n = A,T,C or G
gtttttttgcttacacatggagatagtgtagacaaagtagctgatggattcaaggttgtggcacgttctggaaacatagtagcaggcatagcaaatgantctaaaaagttatatggagcacagttccaccctgaagttggccttacagaanntngaaaagtaatactgaagaatttcctttatgatatagctggatgcagtggaaccttcaccgtgcagaacagagaacttgagtgtattcgagagatcaaagagagagtaggcacgtcaaaagttttt

SEQ ID NO: 12159 - DNA, 254 bp, Homo sapiens
  misc_feature 80: n = A,T,C or G
gaccgccgccgcgccgccatcatggacaccagccgtgtgcagcctatcaagctggccagggtcaccaaggtcctgggcangaccggttctcagggacagtgcacgcaggtgcgcgtggaattcatggacgacacgagccgatccatcatccgcaatgtaaaaggccccgtgcgcgagggcgacgtgctcacccttttggagtcagagcgagaagcccggaggttgcgctgagcttggctgctcgctgggtcttg

SEQ ID NO: 12160 - DNA, 535 bp, Homo sapiens; identical to SEQ ID NO: 860

SEQ ID NO: 12161 - DNA, 587 bp, Homo sapiens; identical to SEQ ID NO: 2548

SEQ ID NO: 12162 - DNA, 619 bp, Homo sapiens
cactatagggaatttggccctcgaggccaagaattcggcacgagaagaaaaatcatattttctaatgatttccaccaaattattgcctttaaaggttaatacttagcctctttgcacaacctcaataatggaaatttttacctacctatttttaaaaattttattacttttttttattgaggcataatttaaactcaggaaaattgacaaatatcgtgtatttggtttgatgagtttgagggggaaatgaataaactagtactgacagttgttgaagtaggccaacccggaaaacatgaaatttaaaatattaaagacagtttttaggaaagattctttgtgactggcttcttgcaggtggtttcagttgtgatttgtttttgttcacatggttcaatgtagcagacatctcaatgagtttaaatcactgtgctggatgcataggacattgagaaatgactaaacataggaattatcctcaagaagcttacaatcgaatgaagagtttaaactaactgcacaataaactatagtgaaaggtaggtttaagaaggtagaatagacggaaaattacacggttggtctagtataatttaagctcatggtataatgagcaaca

SEQ ID NO: 12163 - DNA, 433 bp, Homo sapiens
  misc_feature 129: n = A,T,C or G
agaagtagaaatacagtcccccttcggcatcctaatattcttagactgtatggttatttccatgatgctaccagagtctacctaattctggaatatgcaccacttggaacagtttatggagaacttcanaaactttcaaagtttgatgagcagagaactgctacttatataacagaattggcaaatgccctgtcttactgtcattcgaagagagttattcatagagacattaagccagagaacttacttcttggatcagctggagagcttaaaattgcagattttgggtggtcagtacatgctccatcttccaggaggaccactctctgtggcaccctggactacctgccccctgaaatgattgaaggtcggatgcatgatgagaaggtggatctctggagccttggagttctttgctatgaatttttagttg

SEQ ID NO: 12164 - DNA, 574 bp, Homo sapiens
aagaccacagcgaggaggagagtgaagagggcagcggagaccttggtgagcctctttatgaagagccatgcaacgagataagcaaggagcaggccaaagccacccttctggaggaccagcaagacccttcgccctcgtcctaacaccctggcttcagtgcaactcttttccttcagctgcatgtgattttgtgataaagttcaggtaacaggatgggcagtgatggagaatcactgttgattgagattttggtttccatgtgatttgttttcttcaatagtcttattttcagtctctcaaatacagccaacttaaagttttagtttggtgtttattgaaaattaaccaaacttaatactaggagaagactgaatcattaatgatgtctcacaaattactgtgtacctaagtggtgtgatgtaaatactggaaacaaaaacagcagttgcattgattttgaaaacaaacccccttgttatctgaacatgttttcttcaggaacaaccagaggtatcacaaacactgttactcatctactggctcagactgtactactttttttttttttttcccg

SEQ ID NO: 12165 - DNA, 202 bp, Homo sapiens
aaaaatgtgcaattttcatacagcatcccagtgttgatcatggaggttaatgattctttattgttagggacctatcttgtaattccagagttatttatgttttctacagttgaagaggaaaaataccgcttcttattgcctccttttcaggatttcttctggcttcttgagtagctggagtatttttgagagactcctacag

SEQ ID NO: 12166 - DNA, 248 bp, Homo sapiens
  misc_feature 48: n = A,T,C or G
aataaccttccatatttttttaatggctgcataatatttcaagtatgnatatagcataatttataggcagtctcctcttgaaaaaatgtataaatgggaaaatgctttcccaaataatgtggatgtgaaaattcttatacttctatacttggtatttctgttgagcaggttcctataatgggtatttctaggtcctagttcatgtgcattttaaattttgatcacttctgccaaactaccctcagaaa

SEQ ID NO: 12167 - DNA, 218 bp, Homo sapiens
attaacaccacccacaagcacaaaaaagttaggatgaaaatgttcttcaagaatatggtggaataattgtagcctattgaaaattcataaatgaaaattggagtattgtagacagcattcttgaatcacatgtttgtttctgtgtgtaatactgatgactgtcttaaaatttctaacttccaaataaatcatactccactggattataagggcttcaa

SEQ ID NO: 12168 - DNA, 640 bp, Homo sapiens
gtatgtgtgcctgtgtgctctttcaacaaatttattcaattcacagtgatatctgttggacagagtcagcaatcctaccagacaaaactcatacacacattgattccagatgagaaacaacagtcccccaaggagcttgagaaatcacctagggcagccaagctggggaagggaagtggctgtgcattgctgtgtgtcctttaaggctctttggtcctggttgatttcctcttagaaggttccaaataaaacttccctttcctattcagtacacaccagtctttctttggtgtttaacctaatgggctgaggaagggaggcagccaggaaattatacccattaaagtgtgtggttaatgcctatatatatcatttttactcacagttagtggacttatcttttaaaacagaggtatgtggcagtggggtaagagaacttcccttattatagagaagattccaagaataggttcagacatgatttgaagaaccatgtaactctgctgccttgcacggtcccctttttagcactaataactcctaagtgtctgataatttcaaggttagcagcactcccaaagaagctgtccgggctgggtgtggtggctcatggctgtaatcccagcaatttcagaggctg

SEQ ID NO: 12169 - DNA, 264 bp, Homo sapiens
  misc_feature 85: n = A,T,C or G
gggccaatgccctcctggccaatggcgtggagctgagagataaccagctggtggtgccatcagagggcctgtacctcatctactnccaggtcctcttcaagggccaaggctgcccctccacccatgtgctcctcacccacaccatcagccgcatcgccgtctcctaccagaccaaggtcaacctcctctctgccatcaagagcccctgccagagggagaccccagagggggctgaggccaagccctggtatgagcccatctatc

SEQ ID NO: 12170 - DNA, 220 bp, Homo sapiens
agccggcgtcctgccgcgcgatgcccctgctcggacttcttcccaggagggcctgggcttcgctgctcagccagctcctgcgaccgccctgcgcttcgtgcaccggggcggtccgttgccaaagccaggttgcagaggcagtgttaacatcccaactgaaagcacatcaagagaaaccaaattttattatcaagaccccaaagggtaccagggatcttag

SEQ ID NO: 12171 - DNA, 202 bp, Homo sapiens
atttcattgcaagaaatacctgagcttgacagaccgctctcagatcgcccacgccctcaagctcagtgaggtgcaggtcaagatctggtttcagaatcgacgggccaagtggaagcgcatcaaagctggcagtgtgagcagccgttctggggagcccgtaagaaaccccaagattgttgtccccatacctgtgcatgtcaac

SEQ ID NO: 12172 - DNA, 439 bp, Homo sapiens
aaacaacaatacaggctagggatggtaatcctttaaacatacaaaaattgctcgtattataaattacccagtttagaggggaaaaaagaaaataattattcctaaacaaatggataagtagaattaatgattgaggcaggaccctacagagtgtgggaactgctggggatctagagaattcagtgggaccaatgaaagcatggctgagaaatagcagggtagtccaggatagtctaagggaggtgttcccatctgagcccagagataagggtgtcttcctagaacattagccgtagtggaattaacaggaaatcatgagggtgacgtagaattgagtcttccaggggactctatcagaactggaccatttccaagtatataacgatgagccctctaatgctaggagtagcaaatggtcctaggaaggggactgaggatt

SEQ ID NO: 12173 - DNA, 454 bp, Homo sapiens
taaacaaagacgagcaggactaaacgaattcattcagaacctagttaggtatccagaactttataaccatccagatgtcagagcattccttcaaatggacagtccaaaacaccagtcagatccatctgaagatgaggatgaaagaagttctcagaagctacactctacctcacagaacatcaacctgggaccgtctggaaatcctcatgccaaaccaactgactttgatttcttaaaagttattggaaaaggcagctttggcaaggttcttcttgcaaaacggaaactggatggaaaattttatgctgtcaaagtgttacagaaaaaaatagttctcaacagaaaagagcaaaaacatattatggctgaacgtaatgtgctcttgaaaaatgtgaaacatccgtttttggttggattgcattattccttccaaacaactgaaaagctttatttt

SEQ ID NO: 12174 - DNA, 461 bp, Homo sapiens
tcggaacgaggtggttaatgaatccaaaactattttaaagctttgcgattttgggtcggcttcacatgtgtgcggataatgacataacaccttatcttgtcagtagattttatcgtgctcctgaaatcattataggtaaaagctatgactatggtatagatatgtggtctgtaggttgcaccttatacgaactctatactggaaaaattttattccctggcaaaaccaataaccatatgctgaagcttgcaatggatctcaaaggaaagatgccaaataagatgattcgaaaaggtgtgttcaaagatcagcattttgatcaaaatctcaacttcatgtacatagaagttgataaagtaacagagagggagaaagttactgttatgagcaccattaatccaactaaggacctgttggctgacttgattgggtgccagagacttcctgaagaccaacgtaag

SEQ ID NO: 12175 - DNA, 650 bp, Homo sapiens; identical to SEQ ID NO: 3637
  misc_feature 206, 207, 294, 376: n = A,T,C or G

SEQ ID NO: 12176 - DNA, 562 bp, Homo sapiens; identical to SEQ ID NO: 868

SEQ ID NO: 12177 - DNA, 74 bp, Homo sapiens; identical to SEQ ID NO: 3640

SEQ ID NO: 12178 - DNA, 817 bp, Homo sapiens
  misc_feature 476, 537, 548: n = A,T,C or G
gcggccgcccgccgccgcgctcctcctcctcctcctccagcgcccggcggcccgctgcctcctccgcccgacgccccgcgtcccccgccgcgccgccgccgccaccctctgcgccccgcgccgccccccggtcccgcccgccatgcccggcccggccgcgggcagcagggcccgggtctacgccgaggtgaacagtctgaggagccgcgagtactgggactacgaggctcacgtcccgagctggggtaatcaagatgattaccaactggttcgaaaacttggtcggggaaaatatagtgaagtatttgaggccattaatatcaccaacaatgagagagtggttgtaaaaatcctgaagccagtgaagaaaaagaagataaaacgagaggttaagattctggagaaccttcgtggtggaacaaatatcattaagctgattgacactgtaaaggaccccgtgtcaaagacaccagctntggtatttgaatatatcaataatacagattttaagcaactctaccagatcctgacagactntgatatccggntttatatgtatgaactacttaaagctctggattactgccacagcaagggaatcatgcacagggatgtgaaacctcacaatgtcatgatagatcaccaacagaaaaagctgcgactgatagatgggggtctggcagaattctatcatcctgctcaggagtacaatgttcgtgtaacctcaaggtacttcaagggaccagagcttctcgtggactatcagatgtatgaatatagctgggacatggtgagtttgggctggatgctagcaagc

SEQ ID NO: 12179 - DNA, 503 bp, Homo sapiens; identical to SEQ ID NO: 338

SEQ ID NO: 12180 - DNA, 552 bp, Homo sapiens
gcggccgctcgccccctgtgggggccttgccttgggcttcgggccgctgcgttccgccttgccaggcgacaggtgccatgtgtctgtgccgtgcgacatatgaggagcagcggccatcagaggtgtgaggccctcgctggtgcacccctggataacgcccccaaggagtacccccccaagatacagcagctggtccaggacatcgccagcctcactctcttggaaatctcagacctcaacgagctcctgaagaaaacgttgaagatccaggatgtcgggcttgtgccgatgggtggtgtgatgtctggggctgtccctgctgcagcagcccaggaggcggtggaagaagatatccccatagcgaaagaacggacacatttcaccgtccgcctgaccgaggcgaagcccgtggacaaagtgaagctgatcaaggaaatcaagaactacatccaaggcatcaacctcgtccaggcaaagaagctggtggagtccctgccccaggaaatcaaagccaatgtcgccaaagctgaggcggagaagatcaaggcggcc

SEQ ID NO: 12181 - DNA, 468 bp, Homo sapiens
tggtacgcctgcaggtaccggtccggaattcccgggtcgacccacgcgtccgaaacattgtaacattccctttacttgagggcgtccacaataccgtaaggttgcgtgaactgtcctactgaatcttcatggttgcttggattttaatcacatcagaagaatttgagagcataccatggctggcagtccataaaagactagttaggaacatcagcttttaatcatcgaccctgctttcaggtttcattttaaacttatagaagaggggaagacatcagtgtgcttatttggcctttactctaaatcttaaaaggaagaaaattttaatatttcttagtttgagcccaggtgcggtgtctcacgcctgtaatcacagcactttgggaggccaaggcaggcggatcacttgaggtcaggagttcaagaccagcctgccaacgtggtgaaaccctgtctgtactaaaaatt

SEQ ID NO: 12182 - DNA, 565 bp, Homo sapiens
aagcacaagcatgagacctttataacgtcaagtggaaatctgaatacattgaacctgccaaaagagctcatgttgtgccaccaccaagaggaaggggcaggggaggatttggacagggtatacgacctcatgatatttttcgtcagagaaaacagaacacaagtagaccaccatctatgcatgtggatgactttgttgctgctgaaagtaaagaagtggttcctcaagatggaatacctccaccaaaacggccactcaaagtatcacagaagatttcttcccgtggtgggttttcaggcaatagaggaggacggggtgctttccacagtcagaataggtttttcacaccacctgcttcaaaaggaaactacagtcgtcgggaaggaacaagaggctccagttggagtgctcagaatactcctcgaggaaattacaatgaaagtcgtggaggccagagcaattttaacagaggccctcttccaccattacgaccccttagttctacaggttaccgcccaagtcctcgggaccgtgcttctagaggtcgtgggggacttggaccttc

SEQ ID NO: 12183 - DNA, 371 bp, Homo sapiens
gccctgcctctggctccagaacagaaagggagcctcacgctggctcacacaaaacagctgacactgactaaggaactgcagcatttgcacaggggaggggggtgccctccttcctagaggtcctgggggccaggctgacttggggggcagacttgacactaggtcccactcactcagatgtgctgaaattccaccacgggggtcaccctggggggttagggacctatttttaacactagggggctggcccactatgagggctggccctaagatacagacccccccaactccccaaagcggggaggagatatttattttggggacagtttggaggggagggagaatttattaataaaagaatctttaacttt

SEQ ID NO: 12184 - DNA, 586 bp, Homo sapiens; identical to SEQ ID NO: 873

SEQ ID NO: 12185 - DNA, 256 bp, Homo sapiens; identical to SEQ ID NO: 2521
  misc_feature 96: n = A,T,C or G

SEQ ID NO: 12186 - DNA, 409 bp, Homo sapiens
tggtacgcctgcaggtaccggtccggaattcccgggtcgacccacgcgtccgcggacgcgtgggcggacgcgtgggggagtatgcatcagtcttgcagctgctgaggatgttggcaaaggatgaactgatgaccatacttgagaaatgtttcaaggtttttaagtcttattgtgaaaaccaccttggcagcacagctaagagaatagaggagttcctggcccagtttcagagcctcgatgaaaccaaagaggaagaagatgcttctgggtcacagccaaaggggcttcagaagacagacctctatcatcttcagaagtccttattggaaatgaaggagttaagaagaagtaagaagcaaaccaaatttgaagtactcagagaaaatgttgtgaacttcattgactgtct

SEQ ID NO: 12187 - DNA, 235 bp, Homo sapiens
tgttttacctactttaaaagttttaatggattgcacctctgtaaactattcctaaaatgtgtatgatatatttgaaaaggcttccattaatataaaagctttgcttgcagccttccaatctatgttggtttacctgtagtgttttataaagtgtggtcagaggcccctatagaatgtattgtttgaaagtgtagtgatatatttgtgtttttatttcaagtaagtcattttaacc

SEQ ID NO: 12188 - DNA, 225 bp, Homo sapiens; identical to SEQ ID NO: 876
  misc_feature 8, 23, 28, 47, 50, 85, 108, 110, 112, 121, 122, 133, 152,157, 161, 172, 182, 190, 216: n = A,T,C or G

SEQ ID NO: 12189 - DNA, 446 bp, Homo sapiens
cacagcaagggaatcatgcacagggatgtgaaacctcacaatgtcatgatagatcaccaacagaaaaagctgcgactgatagattggggtctggcagaattctatcatcctgctcaggagtacaatgttcgtgtagcctcaaggtacttcaagggaccagagctcctcgtggactatcagatgtatgattatagcttggacatgtggagtttgggctgtatgttagcaagcatgatctttcgaagggaaccattcttccatggacaggacaactatgaccagcttgttcgcattgccaaggttctgggtacagaagaactgtatgggtatctgaagaagtatcacatagacctagatccacacttcaacgatatcctgggacaacattcacggaaacgctgggaaaactttatccatagtgagaacagacaccttgtcagccctga

SEQ ID NO: 12190 - DNA, 418 bp, Homo sapiens; identical to SEQ ID NO: 3647

SEQ ID NO: 12191 - DNA, 166 bp, Homo sapiens
  misc_feature 141, 162: n = A,T,C or G
tgactgtctaaatggaggaacatgtgtgtccaacaagtacttctccaacattcactggtgcaactgcccaaagaaattcggagggcagcactgtgaaatagataagtcaaaaacctgctatgaggggaatggtcacttttnccccggggaaaggccgggccnttga

SEQ ID NO: 12192 - DNA, 560 bp, Homo sapiens; identical to SEQ ID NO: 3648

SEQ ID NO: 12193 - DNA, 506 bp, Homo sapiens
ttctgctcctttgagacccggcgccacctatgtatggtcatggaatacgtggaaggcggcgactgcgccacgctcctgaagaacatgggcccgctgcccgtggacatggcccgcctgtacttcgccgagacggtgttggcgctgtagtacctgcataactatggcatcgtgcaccgtgacctcaaaccagacaatctgctcatcacctcgcttggccacatcaagctcacggacttcggcctgtccaagatcggcctcatgagcatggccaccaacctctatgagggccacatcgagaaggacgcccgagagttcatcgacaagcaggtgtgtgggacgccggagtacatagcccccgaggtgatcttccgccagggctatgggaagccagtggactggtgggccatgggcgtcgtcctctatgagtttctggtgggctgcgtgcctttctttggagatacccccgaggaactcttcggtcaggtggtcagcgatgagatcatgtg

SEQ ID NO: 12194 - DNA, 439 bp, Homo sapiens
  misc_feature 426, 435: n = A,T,C or G
tctcttagccaaaggggccttatcaacattctgaaggcaaaacccctctctcttgtatttgttaaaggcgtggaaggttgctttcacacaggtatgcacggcagctccggaagatcctagaatatccggagtcatcagaggattggaggacagctgacttccatcttgtagccattcattgtacctcaagccagacattttaagccttttgtttggatctactgtgagaagtccttggatcaaatctttagcctcttgggatacattcttccaggcttctccttcaaaggagaaatctccctttttaattttcttcatgatttccaccgcgctggtacacgtcaaacttcggtcatgagattggaagggaacctgtcctgacaacattgtgtacaaaatgacgcccaagctccacaggtcacaggnctcatcgtngcgg

SEQ ID NO: 12195 - DNA, 520 bp, Homo sapiens; identical to SEQ ID NO: 3649

SEQ ID NO: 12196 - DNA, 473 bp, Homo sapiens; identical to SEQ ID NO: 3650

SEQ ID NO: 12197 - DNA, 567 bp, Homo sapiens; identical to SEQ ID NO: 879

SEQ ID NO: 12198 - DNA, 504 bp, Homo sapiens; identical to SEQ ID NO: 3651

SEQ ID NO: 12199 - DNA, 245 bp, Homo sapiens
gcctatatgcaaagtattttatcagggacttgaacaaagacctcactctttttcacttgtcttatgtcgagagaaaaggttattggcagccacattcctaagactggggaatggtgtgtccttttaaatttgaagatgactttaggtaattatggaaactcctcaaagaggagaaagtaatttttttccagacatttttctcattctgtgtctttcacacactagtttccatagttcgagaattc

SEQ ID NO: 12200 - DNA, 259 bp, Homo sapiens
cgccatcatgaacgacaccgtaactatccgcactagaaagttcatgaccaaccgactacttcagaggaaacaaatggtcattgatgtccttcaccccgggaaggcgacagtgcctaagacagaaattcgggaaaaactagccaaaatgtacaagaccacaccggatgtcatctttgtatttggattcagaactcattttggtggtggcaagacaactggctttggcatgatttatgattccctggattatgcaaagaaa

SEQ ID NO: 12201 - DNA, 256 bp, Homo sapiens
  misc_feature 88: n = A,T,C or G
ggattatgatagggacaaggatgataaaatttcctgggaagaatacaaacaagccacctatggttactacctaggaaaccccgcagantttcatgattcttcagatcatcacacctttaaaaagatgctgccacgtgatgagagaagattcaaagctgcagacctcaatggtgacctgacagctactcgggaggagttcactgcctttctgcatcctgaagagtttgaacatatgaaggaaattgtggttttggaa

SEQ ID NO: 12202 - DNA, 157 bp, Homo sapiens
ggggaaaacttttggttttttaaaaaaaaagggggttttcccatgggaaaaggggggggcccaaacccccaaccttgggggaatccccccctttaacccccaaaaggggggggaaaaaaggggggaacccttttccccaaacaattatttttttttt

SEQ ID NO: 12203 - DNA, 252 bp, Homo sapiens; identical to SEQ ID NO: 60

SEQ ID NO: 12204 - DNA, 372 bp, Homo sapiens
  misc_feature 20, 26, 27, 358: n = A,T,C or G
acaaccagaaagtggatctnttcagnntgggaattatcttctttgagatgtcctatcaccccatggtcacggcttcagaaaggatctttgttctcaaccaactcagagatcccacttcgcctaagtttccagaagactttgacgatggagagcatgcaaagcagaaatcagtcatctcctggctgttgaaccacgatccagcaaaacggcccacagccacagaactgctcaagagtgagctgctgcccccaccccagatgggaggagtcagagctggcatgaagtgctggcaccacacgctggaccaacgtgggatggggaagggccttaccgcaccattgatgggcccagatctttntcggcagcgcattt

SEQ ID NO: 12205 - DNA, 416 bp, Homo sapiens; identical to SEQ ID NO: 2682

SEQ ID NO: 12206 - DNA, 469 bp, Homo sapiens
aaccaagggaccattaagctgtgtgactttggcagtgccacgaccatctcgcactaccctgactacagctggagcgcccagaggcgagccctggtggaggaagagatcacgaggaatacaacaccaatgtatagaacaccagaaatcatagacttgtattccaacttcccgatcggcgagaagcaggatatctgggccctgggctgcatcttgtacctgctgtgcttccggcagcacccttttgaggatggagcgaaacttcgaatagtcaatgggaagtactcgatccccccgcacgacacgcagtacacggtcttccacagcctcatccgcgccatgctgcaggtgaacccggaggagcggctgtccatcgccgaggtggtgcaccagctgcaggagatcgcggccgcaagcttattccctttagtgagggttaattttagcttggcactggccgtcgttttacaac

SEQ ID NO: 12207 - DNA, 445 bp, Homo sapiens; identical to SEQ ID NO: 3655

SEQ ID NO: 12208 - DNA, 532 bp, Homo sapiens
tagggccctgccgggagctacaggccctacgacgagggtctgcggaggggggttttcatcaccaacgagaccggccagccgctgattgggaaggtatggcccgggtccactgccttccccgacttcaccaaccccacagccctggcctggtgggaggacatggtggctgagttccatgaccaggtgcccttcgacggcatgtggattgacatgaacgagccttccaacttcatcaggggctctgaggacggctgccccaacaatgagctggagaacccaccctacgtgcctggggtggttggggggaccctccaggcggccaccatctgtgcctacagccaccagtttctctccacacactacaacctgcacaacctctacggcctgaccgaagccatcgcctcccacagggcgctggtgaaggctcgggggacacgcccatttgtgatctcccgctcgacctttgctggccacggccgatacgccggccactggacggtggacgtgtggagctcctgggagcagctcgcct

SEQ ID NO: 12209 - DNA, 581 bp, Homo sapiens; identical to SEQ ID NO: 3657

SEQ ID NO: 12210 - DNA, 625 bp, Homo sapiens; identical to SEQ ID NO: 3658

SEQ ID NO: 12211 - DNA, 549 bp, Homo sapiens; identical to SEQ ID NO: 884

SEQ ID NO: 12212 - DNA, 657 bp, Homo sapiens
ttcggcacgagggaaaacaggtctgaaacaaggtcttacccccagctgcttctgaacacagtgactgccagatctccaaacatcaagtccagctttgtccgccaacctgtctgacatgtcgggacccgtgccaagcagggccagagtttacacagatgttaatacacacagacctcgagaatactgggattacgagtcacatgtggtggaatggggaaatcaagatgactaccagctggttcgaaaattaggccgaggtaaatacagtgaagtatttgaagccatcaacatcacaaataatgaaaaagttgttgttaaaattctcaagccagtaaaaaagaagaaaattaagcgtgaaataaagattttggagaatttgagaggaggtcccaacatcatcacactggcagacattgtaaaagaccctgtgtcacgaacccccgccttggtttttgaacacgtaaacaacacagacttcaagcaattgtaccagacgttaacagactatgatattcgattttacatgtatgagattctgaaggccctggattattgtcacagcatgggaattatgcacagagatgtcaagccccataatgtcatgattgatcatgagcacagaaagctacgactaatagactggggtttggctgagtt

SEQ ID NO: 12213 - DNA, 547 bp, Homo sapiens
tatttattatttttcagttaaatatttattgaacaaatgcagagtaaatgaactaagggctgttataaccttaagttacaacaaacaacttcaaatattcagagggctgtcacacagagaatgaaagacttgctcagtatttctccaaagggcagaacttgagccaagcgataaatataagcaaccaatgggctgcaggatagttgtacaaagtgtatcatgtatcttcatagcttctttgcccatataatgcattccacacttaagtttctccttctaaaaggcgacacgacaagttaatatgtctcataaatgtcttaaataagttgcattttcatggcaagccctccactgccagcaatggatatactcacactattggaaaaaatctaaagttaacaaactggtttagtatggaaatggtctatttgttcctcagctatgtttctgtatcttacattagtggctctcaggaggtggggggtgaaaagagagcatgttctccaaagagggtgaatcataatccccagtgattcagatactgtgc

SEQ ID NO: 12214 - DNA, 595 bp, Homo sapiens; identical to SEQ ID NO: 3661

SEQ ID NO: 12215 - DNA, 529 bp, Homo sapiens; identical to SEQ ID NO: 3662

SEQ ID NO: 12216 - DNA, 325 bp, Homo sapiens; identical to SEQ ID NO: 3663

SEQ ID NO: 12217 - DNA, 265 bp, Homo sapiens
  misc_feature 16: n = A,T,C or G
catgggtggggcggangtctgggatgcgctgggagcctaggatccccgacagttttgcagaacactgaaatctatggactctaaaatggacttcatttaaagaaacccacggaccattaatggacaaaaacatgagtcaatatgtattgtggcattcaaatcctagcactctgggagagcatcaagtaccacgtttttgaagaccatggcctatcatcattatgcattcaagatttgagtttgaataacctcatcaagacttaga

SEQ ID NO: 12218 - DNA, 181 bp, Homo sapiens; identical to SEQ ID NO: 3664

SEQ ID NO: 12219 - DNA, 303 bp, Homo sapiens
aagcaatgagccgattctgtgaggccgagttctcggtcaagacccgaccccactggtgctgcacgcggcagggggaggctcggttctcctgcttccaggaggaagctccccagccacactaccagctccgggcctgccccagccatcagcctgatatttcctcgggtcttgagctgcctttccctcctggggtgcccacattggacaatatcaagaacatctgccacctgaggcgcttccgctctgtgccacgcaacctgccagctactgaccccctacaaagggagctgctggcactgatcc

SEQ ID NO: 12220 - DNA, 168 bp, Homo sapiens; identical to SEQ ID NO: 886
  misc_feature 85, 128, 146: n = A,T,C or G

SEQ ID NO: 12221 - DNA, 105 bp, Homo sapiens
ggggtcgcctttggagcagagaggaggcaatggccaccatggagaacaaggtgatctgcgccctggtcctggtgtccatgctggccctcggcaccctggccgagg

SEQ ID NO: 12222 - DNA, 580 bp, Homo sapiens; identical to SEQ ID NO: 887

SEQ ID NO: 12223 - DNA, 257 bp, Homo sapiens
cccacgcgtccgcccacgcgtccgaaaacgtgtctcaacaaaaacatcagctgcagatcttgtgacagaaacagatcaccttgtggaagatttaattatttctgagttgcgagagaggtttccttcacacaggttcattgcagaagaggccgcggcttctggggccaagtgtgtgctcacccacagcccgacgtggatcatcgaccccatcgacggcacctgcaattttgtgcacagattcccgactgtggcggtta

SEQ ID NO: 12224 - DNA, 491 bp, Homo sapiens
gtgcaaagcccagcaccccaacggcaacaaagaaaagaacgtgcctcttccaggtgagggccgggcccagccaccgggacagagagggagccgaagggggcgggagtggcgggcaccgggctgacacgtgtccctcactgcagtgattgctgagctgcctcccaaagtgagcgtcttcgtcccaccccgcgacggcttcttcggcaacccccgcaagtccaagctcatctgccaggccacgggtttcagtccccggcagattcaggtgtcctggctgcgcgaggggaagcaggtggggtctggcgtcaccacggaccaggtgcaggctgaggccaaagagtctgggcccacgacctacaaggtgaccagcacactgaccatcaaagagagcgactggctcagccagagcatgttcacctgccgcgtggatcacaggggcctgaccttccagcagaatgcgtcctccatgtgtgtccccggtgagtgacctg

SEQ ID NO: 12225 - DNA, 317 bp, Homo sapiens
tggtacgcctgcaggtaccggtccggaattcccgggtcgacccacgcgtccgcaatctgcctcactgctgttctgggccatccccatagccatgtttacatgatttgatgtgcaatagggtggggtaggggcagggaaaggactgggccagggcaggctcgggagatagattgtctcccttgcctctggcccagcagagcctaagcactgtgctatcctggaggggctttggaccacctgaaagaccaaggggatagggaggaggaggcttcagccatcagcaataaagttgatcccagggtttgctttgttttttt

SEQ ID NO: 12226 - DNA, 253 bp, Homo sapiens
  misc_feature 121, 123, 136, 140, 147, 151, 158, 160, 182, 190, 195, 203,226, 231, 235: n = A,T,C or G
gtccgacgttggcctacccagtcggaaggcagagctgcaatctagttaactacctcctttcccctagatttcctttcattctgctcaagtcttcgcctgtgtccgatccctatctactttntntcctcttgtaggnaagnctaagantccnggtttgngntaggttttgtttttctccgggngagatttngaagnccatgttngggaacttttattatcaacaagngaggnaggnagtttttatcacccaccc

SEQ ID NO: 12227 - DNA, 151 bp, Homo sapiens; identical to SEQ ID NO: 891
  misc_feature 56, 65, 71, 87, 91, 107, 133: n = A,T,C or G

SEQ ID NO: 12228 - DNA, 572 bp, Homo sapiens
ggaatttggccctcgaggccaagaattcggcacgagctaggaatagatttacagaagatctcaggccagaatggtacctttaaaaagtcaactgtcctgcaattaggtatccgaatgttggatgtactggaatatatacatgaaaatgaatatgttcatggtgatataaaagcagcaaatctacttttgggttacaaaaatccagaccaggtttatcttgcagattatggactttcctacagatattgtcccaatgggaaccacaaacagtatcaggaaaatcctagaaaaggccataatgggacaatagagtttaccagcttggatgcccacaagggagtagccttgtccagacgaagtgacgttgagatcctcggctactgcatgctgcggtggttgtgtgggaaacttccctgggaacagaacctgaaggaccctgtggctgtgcagactgctaaaacaaatctgttggacgagctcccccagtcagtgcttaaatgggctccttctggaagcagttgctgtgaaatagcccaatttttggtatgtgctcatagtttagcatatgatga

SEQ ID NO: 12229 - DNA, 765 bp, Homo sapiens
  misc_feature 588, 659, 724: n = A,T,C or G
tatcataaagtttaattatgattcagaaaaaatcgagcgaataactttctctgaaaaaatatattgactctgtatagaccacagttattgggggagaagggctggtaggttaaattatcctattttttattctgaaaatgatattaatagaaagtcccgtttccagtctgattataaagatacatatgcccaaaatggctgagaataaatacaacaggaaatgcaaaagctgtaaagctaagggcatgcaagagaaaatctcagaatacccaaagtggcaacaaggaacgtttggctggaatttgaagttatttcagtcatctttgtctttggctccatgtttcaggatgcgtgtgaactcgatgtaattgaaattcccctttttatcaataggtgcttctctgtacagctcatccacttcctcatctgtaaaccgatcccccatggttgtcagcagctctctcaagaatcttcctgtatggtgccagttgcttcttcatcaaagcaagcaaaggcatttctgatgacatcttcaggatctgtgccatttaacttctcaccaaacatggtgaggaacatggtgaaatngatggggcctggagcctcattcatcatggcatctagatacctcatcagtgggatcttccccaatgaagcangcatctcatgcaaatcttccttgcgatgaaacccatcttggtctggatcaatcatgtgaaggctntttgacctcctgatctggactgtcaaacaagcaaacccatt

SEQ ID NO: 12230 - DNA, 263 bp, Homo sapiens; identical to SEQ ID NO: 3667

SEQ ID NO: 12231 - DNA, 432 bp, Homo sapiens
taccggtccggaattcccgggtcgacccacgcgttcggtgattacacgcgtgtgccaccacgctcggctaatttttgtatttttagtagagatgggatttcaccatgttggccaggctggtctcgaactactgacctcgtgatccacctgccacggcctcccaaagtgctgggattacaggcgtgagccaccatgctcggcctaaaaaacaattttcttgaagaatccgattttgtgcatagtaatgacacagcaccattcctgagaaataggaaatatatgtgtgtggtatgaaaagcccatattctgttcttgtcacctgaatctaggcttcctctttggatgtgaacgcgggaatgaacagtggctgttttccacccaaaggggcgtggagaccttttggaaacgggctttctcctttccattttgcag

SEQ ID NO: 12232 - DNA, 214 bp, Homo sapiens; identical to SEQ ID NO: 896
  misc_feature 137, 161: n = A,T,C or G

SEQ ID NO: 12233 - DNA, 475 bp, Homo sapiens; identical to SEQ ID NO: 3668

SEQ ID NO: 12234 - DNA, 505 bp, Homo sapiens; identical to SEQ ID NO: 3669

SEQ ID NO: 12235 - DNA, 542 bp, Homo sapiens
gaaagctggtacgcctgcaggtaccggtccggaattcccgggtcgacccacgcgtccgcccacgcgtccgcaaaaacaccaaaaggaacaaaggggcctgcgttaaaacctaattgctaatgcttcacaactaggagagcatgccgtcttgatgtttaaaaaacccagggtctccacccttcctttgatttgtgcaattctgtcttccacagttccggagccttcagtgaggggtagctacatgccccatgcctgccctttctttccttctttgctcactttactatgggtgtattttaatcttgtataaaaatatgcatgaatgagtcatgcacatgtatacgttatgtatttgacaagtggtggtgaaacaaaatcaaaacagatttgatttgtgtttttgaaatgtcagtacattttgtgccactaacactgtgatgtataaaagagctgtttgaatgccttttaatgttgtgttttgtactctggaatcatatggaaaaagtttgatttgtaatttcaatacatattttaaatgtatt

SEQ ID NO: 12236 - DNA, 166 bp, Homo sapiens
  misc_feature 3, 87, 88, 89, 123: n = A,T,C or G
tgnaacattagacaggatgctgatcttctggacaatcacacttttcctgctgggagcagccaaaggaaaagaagtttgctatgaggnnntcgggtgcttttctgacactgagccctggggcgngacagcaatcaggcccctgaaaattctcccctggagccctgag

SEQ ID NO: 12237 - DNA, 213 bp, Homo sapiens
ggccgcccttttttttttttttttttttttttttggggggggaaaaaaaaattttttgggggggtaaaaaaagggaaaaaggggaaaccaaaaaagtgttttttccccccggggctttttttaaaaaaaaaaagggggaaaccccggggggttgggggggtaaaaatttttggggggttccctgggggggggaaaaaccccttaaaaaaattg

SEQ ID NO: 12238 - DNA, 159 bp, Homo sapiens
ggccgccctttttttttttttttttttttttttttttttttttttaaatattttttaaaaaaaaaaaaaaaaattttttttttaaaaaaggggggggacggggggggggggaaagggccccccccccggggcccccgggggtccccccccaaaaaaaat

SEQ ID NO: 12239 - DNA, 184 bp, Homo sapiens
  misc_feature 6, 70, 100, 103, 148: n = A,T,C or G
gttctntacatggtgacagacctggagctgtacgaagccttctttcggtgcaaggaaattggagcaattncccaggtccatgcggaaaatggagacttanttncagagggagcaaagaagatgttggctctggggataacaggccctnagggcacgagctgtgccgcccagaggcagtggaggc

SEQ ID NO: 12240 - DNA, 689 bp, Homo sapiens
  misc_feature 488, 568, 669, 679: n = A,T,C or G
tgttccttttttgatggggtgtgggggtatagtactcagcttatgccctaaaataacatgtataaaaacccctgaagtattgtgtgggtgtgtacgtgtgagtgtgtgtttgtatacgtctggcaattaaagctttgtcttctggaacttagtgaattcttttctctttttcctccagaagtatttgttacaagatttgtaaataagagctctacttagtttgtttaccatgaacatgttgcagcaaaccttatgcatctaattcctacaaggttaaagaaaggcttttagacttgccaggttaagcaacagccaagttctcagtaattgtttgccttgatttatcttttagacttcattttgccagctctaaaactcccagtcttccttgattttagtccttaatcttttatgttctgagcaggaagggtaaaagacaggaacctgcttcactgtattaactagtccatgggctgagaccggggcantcttttctccaactgcatgttgctagatcatgatcagcaccagaggttgggcatcttgcaaaaccttacagtgctgaaantgcagcatggtactaaggagtaaagttgaaggaccctttattaaaggttttccttaattaatgaatgggtgaaggacagattgtgccagtcggaatcagtnacagcatggngacgggagct

SEQ ID NO: 12241 - DNA, 277 bp, Homo sapiens; identical to SEQ ID NO: 304
  misc_feature 66, 88, 99, 102, 103, 139, 144, 181, 196, 208, 255, 277: n = A,T,C or G

SEQ ID NO: 12242 - DNA, 458 bp, Homo sapiens; identical to SEQ ID NO: 295
  misc_feature 1, 317, 423, 435: n = A,T,C or G

SEQ ID NO: 12243 - DNA, 480 bp, Homo sapiens
  misc_feature 87, 458: n = A,T,C or G
agagaggtcccaagcaactagcccctcaccccaacatcatccgggttctccgcgccttcacctcttccgtgccgctgctgccagggncctggtcgactaccctgatgtgctgccctcacgcctccaccctgaaggcctgggcatggcggacgctgttcctcgttatgaagaactatccctgtaccctgcgccagtacctttgtgtgaacacacccagcccccgcctcgccgccatgatgctgctgcagctgctggaaggcgtggaccatctggttcaacagggcatcgcgcacagagacctgaaatccgacaacatccttgtggagctggacccagacggcttgcccctgggtgggtgatcgcagattttgggctgctgcctgggttgatgagagcatcggccttgcagttgccctttcagcagctggtaacgttggattcggggccggaaacggctnttttgattggccccagaggttt

SEQ ID NO: 12244 - DNA, 176 bp, Homo sapiens
gaatttggccctcgaggccaagaattcggcccgaggcctcgtgccgtgggtgcctgtgggtgcggctgctcaggaggctgaagcacaagaatcgcttgaacccgggaggtggaggttggagtgagccaggatcatgctactgcactctccagcctgggctacagagtgagactctc

SEQ ID NO: 12245 - DNA, 585 bp, Homo sapiens
  misc_feature 525: n = A,T,C or G
gaatttggccctcgaggccaagaattcggcacgaggcctttggctaaatggcaccgctgtaaagagggtctgactgagcgctttgagctgtttgtcatgaagaaagagatatgcaatgcgtatactgagctgaatgatcccatgcggcagcggcagctttttgaagaacaggccaaggccaaggctgcaggtgatgatgaggccatgttcatagatgaaaacttctgtactgccctggaatatgggctgccccccacagctggctggggcatgggcattgatcgagtcgccatgtttctcacggactccaacaacatcaaggaagtacttctgtttcctgccatgaaacccgaagacaagaaggagaatgtagcaaccactgatacactggaaagcacaacagttggcacttctgtctagaaaataataattgcaagttgtataactcaggcgtctttgcatttctgcgaaagatcaaggtctgcaagggaattcttgtgtgctgctttccatttgacaccgaanttctgttcagccatcagaagagagacaaggaattaaaaatttctttttaatcctgttacc

SEQ ID NO: 12246 - DNA, 526 bp, Homo sapiens; identical to SEQ ID NO: 3670

SEQ ID NO: 12247 - DNA, 518 bp, Homo sapiens; identical to SEQ ID NO: 3673

SEQ ID NO: 12248 - DNA, 813 bp, Homo sapiens
  misc_feature 659: n = A,T,C or G
acaaacagtaagaaacactttattataactttataacatataaatagcttgggtcaaatctgtgctttctggcagctgggcaccaagtctgctcccctgcaggctcctgccttccttcacattgcactgttcattgggtggctctggcctggggcatggcggtcgaggctggagtcaaggggctgggcggccagtcccgccctccatctcctcatgcggtggcctgtgcctgtcatctgcttgggttgcggctggtgtggaaggaccgctcctcaggggtcaggccagcaaagaaggggtgcagcagggcctcggctagtgtgatgcgctgggcagggtcaaattctaacatcctcctcatcaggtcaaacagctgcacgtgctccagggagtcttggagcatgtaactcttcagaggtttgcagttctccttcacataccggccgtcagagctgttctcatcccaaactaggccccctttgtagaaatatttctgcttcctggtacggtggatcatgtgtgatgggatgggccctagggtcttctccatcatcaccaggtgctctcggtttttctggttcctgaaaaattttaagccccggtagttctcataagaaatgcagccatgctccagacgtcacagggctgtccagcccagnctaaggattacctcaagcgggcgatagttaacggtggcaacaatggttgtgttgttctcatggttaattgtggaactccaaagttaccaaccggatgctggttgtcttccatgacttttctcaaactcttgtggccattgtagagggtttcaaa

SEQ ID NO: 12249 - DNA, 538 bp, Homo sapiens
ccctcgaggccaagaattcggcacgaggccacactcccagccaaagtctacgtgggtgtgaaacaggagatcgccgagatgcggatacctgccctcaacgcctacatgaagagcctgctcagcctgccggtctgggtgctgatggatgaggacgtccggatcttcttttaccagtcgccctatgactcagagcaggtgccccaggcactccgccggctccgcccgcgcacccggaaagtcaagagcgtgtccccacagggcaacagcgttgaccgcatggcagctccgagagcagaggctctatttgacttcactggaaacagcaaactggagctgaatttcactggagatgtgatcttcctcctcagtcggatcaacaaagactggctggagggcactgtccggggagccacgggcatcttccctctctccttcgtgaagatcctcaaagacttccctgaggaggacgaccccaccaactggctgcgttgctactactacgaagacaccatcagcaccatcaagtctgtggcctggg

SEQ ID NO: 12250 - DNA, 53 bp, Homo sapiens
ctcactatttggaatttggccctcgaggccaagaattcggcacgaggacagat

SEQ ID NO: 12251 - DNA, 289 bp, Homo sapiens; identical to SEQ ID NO: 3676

SEQ ID NO: 12252 - DNA, 203 bp, Homo sapiens; identical to SEQ ID NO: 903

SEQ ID NO: 12253 - DNA, 626 bp, Homo sapiens; identical to SEQ ID NO: 3679

SEQ ID NO: 12254 - DNA, 259 bp, Homo sapiens
  misc_feature 258: n = A,T,C or G
ctttgctcagccccctctgttctgctgattgtagggatgtgcagggctgggagttggcactccccccgagtggggaggtgacagcttgtcacagtagccaggcttgggtgggttcagcactagctcgggacggtgtgtcacacgtctatagtaaaccagttctctgggaggggaaaaaagccctgatttattgcatttgggcagcttctgtggtgtaaattctcccagcagtgtcccatgtcatgctgccagcatcana

SEQ ID NO: 12255 - DNA, 462 bp, Homo sapiens
gaaactggtacgcctgcaggtaccggtccggaattcccgggtcgacccacgcgtccgctgacttattcttggagcgcttagctttccctgacctttggcttcaccctctgataccaactgattatattaaaaacttaccaatgtggcgatttaaatgtcttggagtccagtctgaagaggaaatgtcggaggggtctcaagatactgaaaatgactcggaaagtgagaacacagacactttgagtagtgagaaggaagtatttgaagataagcaaagcgtacttcacaattctccaggaacagcaagtcactgtgatgctgaggcttgttcatgtgccaataaatattgtcagaccagcccatgtgaaaggaaggggaggtcatatggatcatataacactaatgaagatatggaacctgattggttaacttggcctgctgatatgctgcactgtactgaat

SEQ ID NO: 12256 - DNA, 448 bp, Homo sapiens
tggtacgcctgcaggtaccggtccggaattcccgggtcgacccacgcgtccggtcattaacttgtcagtacctatagttctgactgcgactcatgaagataaagagaggctggacggctgtacagcatttgctctgatgtatgaaggccgccgtgtggccattcttcgcaatccagagttttttgagcacaggaaagaagagcgctgtgccagacagtggggaacgacatgcaagaaccacccctatattaagatggtgatggaacaaggagattggctgattggaggagatcttcaagtcttggatcgagtttattggaatgatggtcttgatcagtatcgtcttactcctactgagctaaagcagaaatttaaagatatgaatgctgatgctgtctttgcatttcaactacgcaacccagtgcacaatggacatgccctgttaatg

SEQ ID NO: 12257 - DNA, 243 bp, Homo sapiens; identical to SEQ ID NO: 907
  misc_feature 15, 26, 55, 68, 97, 102, 132, 136, 156, 169, 192, 205, 226: n = A,T,C or G

SEQ ID NO: 12258 - DNA, 484 bp, Homo sapiens; identical to SEQ ID NO: 3680

SEQ ID NO: 12259 - DNA, 300 bp, Homo sapiens
  misc_feature 19, 21, 34, 114, 130, 135, 139, 143, 210, 217, 243, 261,277, 299: n = A,T,C or G
gaaaaactgtgaattattnanacggaagctctgnagcctggacaacggggactgtgaccagttctgccacgaggaacagaactctgtggtgtgctcctgcgcccgcgggtacancctggctgacaacggnaaggnctgnattnccacagggccctacccctgtgggaaacagaccctggaacggaggaagaggtcagtggcccaggccancagcagnagcggggaggcccctgacagcatganatggaagccatatgatgnagccgacctggacccnaccgagaaccccttcgacctgnt

SEQ ID NO: 12260 - DNA, 153 bp, Homo sapiens
ggccgccctttttttttttttttaaaataaaaggccttaatttgggggggggcccagggggcccctttggggggaaaagggccaattttttaaccccccacccaggtttttggggaaagaaagggggggaaaaaaaaaaccgggggggggccc

SEQ ID NO: 12261 - DNA, 125 bp, Homo sapiens
ctctgctggaggattgattcatgagatcttactgttggaaaacgcttcaaagagcaaataacttcctgtggcccttcaaattgtcttctccacgatgtggaatgaagaaaaagaccacccatttt

SEQ ID NO: 12262 - DNA, 278 bp, Homo sapiens
  misc_feature 213, 222, 255: n = A,T,C or G
ggcccgcaagcggctcaccaagcgctcggaggaggtggtgcgtctgctggtgacgcggcagtcgctgcagaaggccgtgcagcagtccatgctgtcctagcagccaccaccatctgcgactcctgcctgccgcctctctgtacagtaacgccacttccacactctgtccccatctggcttctgctgaccgctgggccccagctcagaagggcnatagctggncccagaggcctggcctggccttccttcccttcncccatccctggcctggggcctct

SEQ ID NO: 12263 - DNA, 256 bp, Homo sapiens; identical to SEQ ID NO: 58

SEQ ID NO: 12264 - DNA, 576 bp, Homo sapiens
  misc_feature 565: n = A,T,C or G
aagaagataggccgaggacagttcagcgaggtgtacaaggccacctgcctgctggacaggaagacagtggctctgaagaaggtgcagatctttgagatgatggacgccaaggcgaggcaggactgtgtcaaggagatcggcctcttgaagcaactgaaccacccaaatatcatcaagtatttggactcgtttatcgaagacaacgagctgaacattgtgctggagttggctgacgcaggggacctctcgcagatgatcaagtactttaagaagcagaagcggctcatcccggagaggacagtatggaagtactttgtgcagctgtgcagcgccgtggagcacatgcattcacgccgggtgatgcaccgagacatcaagcctgccaacgtgttcatcacagccacgggcttcgtgaagctcggtgaccttggtctgggccgcttcttcagctctgagaccaccgcagcccactccctagttgggacgccctactacatgtcaccggagaggatcatcagaacggctacaattaagtccgacatctggtcttggctgtctgctgtanagatggcagcc

SEQ ID NO: 12265 - DNA, 421 bp, Homo sapiens
acacaaagccaaatcacagaatgactggaagtgctcacacaaccaagccaagaagcgcgttgtgtttgctgactccaagggcctctctctcactgcgatccatgtcttctccgacctcccagaagaaccagcgtgggatctgcagtttgatctcttggaccttaatgatatctcctctgccttaaaacaccacgaggagaaaaacttgattttagatttccctcagccttcaaccgattacttaagtttccggagccactttcagaagaactttgtctgtctggaaaactgctcgttgcaagagcgaacagtgacagggactgttaaagtcaaaaatgtgagttttgagaagaaagttcagatccgtatcactttcgattcttggaaaaactacactgacgtagactgtgtctatatgaaa

SEQ ID NO: 12266 - DNA, 521 bp, Homo sapiens; identical to SEQ ID NO: 3685

SEQ ID NO: 12267 - DNA, 130 bp, Homo sapiens
  misc_feature 41, 62, 71, 108, 116: n = A,T,C or G
ggatatacaagatgacgcccaggctccacaggtcgcagcgnttgtcgtagatgctagcctcntcgctgaangcctccactaactccggggccatgtactccgcgagcngcacggantatgcagctccggg

SEQ ID NO: 12268 - DNA, 491 bp, Homo sapiens
tggtacgcctgcaggtaccggtccggaattcccgggtcgacccacgcgtccgcatttatccagaggtgtatgtgccagaccttaatcctgttatatctggatacattaaaagcgttggtcagcctctatgtctggatgttggagaaaacaatcaaggaggcaaaccattaattatgtatacatgtcatggacttgggggaaaccagtactttgaatactctgctcaacatgaaattcggcacaacatccagaaggaattatgtcttcatgctgctcaaggtctcgttcagctgaaggcatgtacctacaaaggtcacaagacagttgtcactggagagcagatatgggagatccagaaggatcaacttctatacaatccattcttaaaaatgtgcctttcagcaaatggagagcatccaagtttagtgtcatgcaacccatcagatccactccaaaaatggatacttagccaaaatgattaagtgttcctt

SEQ ID NO: 12269 - DNA, 238 bp, Homo sapiens
  misc_feature 6, 12, 30, 78, 81, 86, 102, 111, 133, 159, 167, 169, 171,175, 196, 225: n = A,T,C or G
gtccancaacgnccgggccgagggcgactnatgggttctgaatggaaccaaagcctgggtcaacaatgcctgggaggnttnggctnccgtggtctttgccancacggacanaggcctgcaaaacaagggcatnaagtgcctttctggtcccattccaanggctgggntnanggtngggaaggaaggagacaagctnggcatccgggcttatccacgggcaaactnattttgagggctt

SEQ ID NO: 12270 - DNA, 502 bp, Homo sapiens; identical to SEQ ID NO: 3688
  misc_feature 383: n = A,T,C or G

SEQ ID NO: 12271 - DNA, 232 bp, Homo sapiens; identical to SEQ ID NO: 910

SEQ ID NO: 12272 - DNA, 193 bp, Homo sapiens
catcccaaacggtcaactgatccaactccctgtggctgagattgtggttaaagatattgcccaggtcaaatacggagatctgctgtctgcggatggaatcctgatccaagggaatgatttgaagattgatgagagctctctgacaggggaatctgaccatgtcaacaagtccctggacaaagaccccatgttg

SEQ ID NO: 12273 - DNA, 484 bp, Homo sapiens
ggcctttggttttttccagagttagatcctctcagaacagagtctgggagaactccaatgctgaatggagaagggtaataggttggtgcagtgaatgggctgggggtggggtggccttctccaggcctgagtgtttttgtgtccagctcagtatctgcaacaagaagtttcccacttgtggatgtttagtgcagccacagacttgtattttgatccccaatttttttttgaaagagttctcctcataggaggatgattcaccatcaaaagaaaaaggaccccataccttggtgtcattaacataattattttaagccttatccagcagccataatttgaataactctacgagaccagagagactgtagttccctattttaacctcaattatgcatttgtcccccaaccccactgaaaactaaatgctgtaccacagagccgggtgtgaactatggtttaaaaggttcaagtttccatttaaagt

SEQ ID NO: 12274 - DNA, 304 bp, Homo sapiens
  misc_feature 1, 17, 222, 237, 296: n = A,T,C or G
ntttttttttaatcagnctcatgaaaggtgctatgactcagcaattcaaaggccatgcaaacatggttccggaatgtgaaactttccagcatgtggataacgttcatactaccagttttatcctgtttcttaagatgctccaaaatccgggatctcctcagctgcttgacgatgaaagcgcttctcattgcgcaccatttttagggccacggtactgtcgangtttgtgatcatagnaccctgggccacctgcccaaaactccccttgccaataattttcaggcacctcatatcgntaaggcta

SEQ ID NO: 12275 - DNA, 586 bp, Homo sapiens
tcggcacgaggggcaggagagggaaaggcagcggcggcggcagctggaggatgaagaaggagcatgtgcttcactgccagttctccgcgtggtacccgttcttccgaggcgttaccatcaagagtgtcattcttccacttcctcagaatgtgaaggattatttactcgatgatggaactctggtggtttcaggaagggatgatccaccaacacattctcagccagacagtgatgatgaagcagaagaaatacagtggtctgatgatgagaacacagccacgcttacggcaccagaatttcctgagtttgccactaaagtccaggaagctatcaattccctcgggggcagtgtctttcctaagcttaattggagtgccccaagggatgcgtattggatagcaatgaatagttctctgaaatgtaaaaccctcagcgacatctttctgcttttcaagagttccgatttcatcactcgtgacttcactcagccgtttattcattgtactgatgattctccagatccatgtatagaatatgagctcgttctccgaaaatggtgtgaattgattcctggggctgagtttcg

SEQ ID NO: 12276 - DNA, 624 bp, Homo sapiens; identical to SEQ ID NO: 3692

SEQ ID NO: 12277 - DNA, 67 bp, Homo sapiens
taccggtccggaattaattcccgggtcgacgagctcactagtcggcggccgcccttttttttttttt

SEQ ID NO: 12278 - DNA, 171 bp, Homo sapiens
ctctgctgctggccagtgggagtggcacgaggtggggctttgtgccagtaaaaccacaggctggatttgcctgcgggccatggtccctgtctagggcagcaattctcaaccttcttgctctcaggaccccaaagagctttcattgtatctattgatttttaccacattagc

SEQ ID NO: 12279 - DNA, 247 bp, Homo sapiens
  misc_feature 231: n = A,T,C or G
gctgattggagtcagctggaacataccactgcctctagactaaggccagcagatttagcaaatacagactgccccagttcattgaattttagataaatgaaataaatctataaggttaagtatgtccccagaactgcatggaacatgttaatctaaacaatgatttgttgttcacctgaaattcaaatttagctgggtgtcctgtatttcatctggcaaccctacttcagncccaggtgtaaggtac

SEQ ID NO: 12280 - DNA, 50 bp, Homo sapiens
tggtacgcctgcaggtaccggtccggaattcccgggtcgacccagcgtcc

SEQ ID NO: 12281 - DNA, 233 bp, Homo sapiens
cccccccccaggtttaaaaaatttttttttttaaaccccccaaggggggggaaaaaaaggcccccccccccaacttaaaaaaaattttgggttttaaaaaaaaaaggggtttcccctttttggccaaaatttcccccctttaaggacctttgaaccccccccctttggcccccaaaaggggggggattaaagggggaaacccccccccccgggaaaatttttttttttttttt

SEQ ID NO: 12282 - DNA, 498 bp, Homo sapiens
tggtacgcctgcaggtaccggtccggaattcccgggtcgacccacgcgtccggtaagactttaacccatgagatcggacacatatttggactgcgacactgccagtggcttgcatgcctcatgcaaggctccaaccacttggaagaagctgaccggcgccctctaaacctttgccctatctgtttgcacaagttgcagtgtgctgttggcttcagcattgtagaaagatacaaagcactggtgaggtggattgatgatgaatcttctgacacacctggagcaactccagaacacagtcacgaggataatgggaatttaccgaaacccgtggaagcctttaaggaatggaaagagtggataataaaatgcctggcagttctccaaaaatgaggaccttcaaataggagtgattgaaataaataactacttgcatgttatgctttcatttgggtggaatacttcattggaataaactactgatcttgtgctgtgtcaaaa

SEQ ID NO: 12283 - DNA, 244 bp, Homo sapiens; identical to SEQ ID NO: 77
  misc_feature 5, 12, 19, 31, 124, 169, 200: n = A,T,C or G

SEQ ID NO: 12284 - DNA, 617 bp, Homo sapiens
tggtacgcctgcaggtaccggtccggaattcccgggtcgacccacgcgtccggtgggcaagtagttggaaccagagaacagcctgcctgctttgacagttatcccagggagcgtgagaaaatccctgggtctagaatgggaactggagaggaccctgagaggagacgggctgggcggcgacccccacagggctctcgagaacagattctcccctccagtatgggccctggctgtggcccccattcctcaggactgcacagaggaggactggctccggctccgtcgggctcacccttaaccactattcctggctctgcaaaccccagactttgcacacagccccaggctccacacagaaatgtgaacttggcctcagacaggctggcccttcctaggctctaggggctagcggggagtggggagccaagaggtcccatattcctgagtgcaggggtagtccctctcacctgcttcctcagacgactctggaagcttccctctaccaccgggcactgagacgaagctccctgacagccgagactggcagccctccatctggtccgtaccctcgccagaggcccccctacatcaacctcctggcgatgccctggtggagc

SEQ ID NO: 12285 - DNA, 165 bp, Homo sapiens
ggccgcccttttttttttttttaaaaattttaaattttaaaaaaaaaaacggccccaaaaagggggtggggttattttaagtcccttaccggcaaaacgggggggcaggacctttttaattttttctcccttttttttgaaaaaaaaaaccagggggaaaaggtt

SEQ ID NO: 12286 - DNA, 264 bp, Homo sapiens
gaagcctggaacaaagttgcccactcatttaactgcacgccaatagaaggtatgctgtcacaccagttgaagcagcatgtcatcgatggagaaaaaaccattatccagaatcccacagaccagcagaagaaggaccatgaaaaagctgaatttgaggtacatgaagtatatgctgtggatgttctcgtcagctcaggagagggcaaggccaaggatgcaggacagagaaccactatttacaaacgagacccctctaaacagtat

SEQ ID NO: 12287 - DNA, 210 bp, Homo sapiens; identical to SEQ ID NO: 917
  misc_feature 110, 178: n = A,T,C or G

SEQ ID NO: 12288 - DNA, 199 bp, Homo sapiens
  misc_feature 3, 13, 25, 77, 88, 129, 136, 143, 156, 169: n = A,T,C or G
agnatctcagtgnaacaaatatagnggaacagaccggtaatgaccctcatgggatggagcatctcagcctgatgggnagaaaacaggnaccatgaccattcacaacggcatgttcttcagcacggtatnacagagnacaatgnacggctggttaanatcagatcccagnaaaacagtgttctaaagaagacggtggtgg

SEQ ID NO: 12289 - DNA, 84 bp, Homo sapiens; identical to SEQ ID NO: 918
  misc_feature 4, 8, 21, 23, 25, 36, 48, 51, 75, 81: n = A,T,C or G

SEQ ID NO: 12290 - DNA, 133 bp, Homo sapiens
aatgttagagactgcagatggagaaagcatgaatacggaagaatcaaatcaaggatctactccaagtgaccaacagcaaaacaaattacgaagttcatagacgagatttgttcaacactgcaattgtttgtta

SEQ ID NO: 12291 - DNA, 582 bp, Homo sapiens
gataaaggcctcaacttggtagtttactgaaagttcttggacaaatagtccataaaagctgttgacctctaaatgcactatggctggttaaatacagtgaccatccttcttccagctgtaaaggatgaagcgtattaagcattagccaggcagtaataaagctaaatagccatacagcagctctgacaatgttgtgctggatattgcagtttgctttcaaggtgcagatgtaaggatttaaaaaaataataatttggcaccaaataaatatgagtagcatccattggcctattaaatcgagtcaggatttgaagggaattgagtttgagaaatgaataaataaaggcaccttggtgcctgaccccctcaatcatgcgtgtgactttgagcactcacaggtgtgtgcagctactcagcccagggcaggtgggttagcctggggttataccttggccctgggaatagacaccattgggcctttggttttgttgggcttccttttgtctttacactccacacaggtggtagaaatctgagttctaaagcacttttgtgaaatacaagctaagtgagaattctaaa

SEQ ID NO: 12292 - DNA, 526 bp, Homo sapiens
ccaagaattcggcacgaggccaaaagagcatattatagtcaatgaggtttaaggtttcttcggttcagtcatgtggaagttttgctttcctaaaattatagctggatcactttgattggatttgggatattacccaaatgctaatcaaatattaaaaggcaatcttttttgttatgtgattgctacagattactgctcttacagtttgattcttcaaattttcattctcagaagggaatcttaaacccagtttgaagggtaccttgtccacaaccacttttaaattttggctaacttcccaaccttccaccatgttctgggaaaactttttctgctcttatagtatgtatgtattcaggaagtgcaacattattaaactaagcataattcagaagctaagtttcctttcatcaaaatttaatattacgaattgtgcaaagaagtatgttactttgatcagctttattttagagcttctttatcaagttatcatcagtcctcttgaattatttctgaaataagggga

SEQ ID NO: 12293 - DNA, 169 bp, Homo sapiens
acagtgaaacttcttgagatggttacataatgtctaaatctgctggtgtagaagttaataaagtgtagaactgaataactattaaatattagatcaagtttctcatgtttatcttaacgtataacgatttatcttaaagcactgattttcacaaaataacatcagtgtg

SEQ ID NO: 12294 - DNA, 559 bp, Homo sapiens; identical to SEQ ID NO: 3700

SEQ ID NO: 12295 - DNA, 246 bp, Homo sapiens
  misc_feature 20, 98, 105, 123, 198: n = A,T,C or G
ggatattcccagtgccactncagaaaagcaggtaacacaggaaggtgaagatggagatggtgatcttgcagatgaagaggaaggaactgtacaacagnctcaagncagtgtcctgtatgaggntttgcttatgtctgaaggagaagatgatgaggaagatgctgggagtgatgaagaaggagacaatcctttctctgntattcagctgagtgaaagtggaagtgactctgatgtgggatcttgtgg

SEQ ID NO: 12296 - DNA, 301 bp, Homo sapiens
  misc_feature 16, 109: n = A,T,C or G
gcgctcctgcgcggtnatttctgggaaaagccagcttctgtttgcactggtcttcacaactcgttacctggatctttttacttcatttatttcattgtataacacatcnatgaaggttatctaccttgcctgctcctatgccacagtgtacctgatctacctgaaatttaaggcaacctacgatggaaatcatgataccttccgagtggagtttctggtggtccctgtgggaggcctctcatttttagttaatcacgatttctctcctcttgagatcctctggacttctccatctacctgg

SEQ ID NO: 12297 - DNA, 66 bp, Homo sapiens
cccttttttgtttttttctttttggatttcatgtctttgaggaccccttgctaatgatgaaaaaat

SEQ ID NO: 12298 - DNA, 399 bp, Homo sapiens
  misc_feature 8, 87, 109, 354, 385, 390: n = A,T,C or G
agagaggncccaagcaactagcccctcaccccaacatcatccgggttctccgcgccttcacctcttccgtgccgctgctgccagggncctggtcgactaccctgatgtnctgccctcacgcctccaccctgaaggcctgggcatggcggatcgctgttcctcgttatgaagaactatccctgtaccctgcgccagtacctttgtgtgaacacacccagcccccgcctcgccgccatgatgctgctgcagctgctggaaggcgtggaccatctggttcaacagggcatcgcgcacagagacctgaaatccgacaacatccttgtggagctggacccagacggctgcccctggctngttgatcgcagattttggctgctacctgggntgatnagagcatcg

SEQ ID NO: 12299 - DNA, 486 bp, Homo sapiens
  misc_feature 376, 395, 467: n = A,T,C or G
agcctgatctctgtccaccggtcctttataccctcatgacccgctgctgggactacgaccccagtgaccggccccgcttcaccgagctggtgtgcagcctcagtgacgtttatcagatggagaaggacattgccatggagcaagagaggaatgctcgctaccgaacccccaaaatcttggagcccacagccttccaggaacccccacccaagcccagccgacctaagtacagaccccctccgcaaaccaacctcctgggctccaaagctgcagttccaggttcctgagggtctgtgtgccagctctcctgacggcttcaccagccctatgggagtattccattcttcccgttaaattcactggcacaccccacctnttccaccgggcacaatgtntttcaaaacggccacaggatgggggggagggagggattttcattccaacccaggcaggccgaggaagagggnccagcagttgttggggagg

SEQ ID NO: 12300 - DNA, 589 bp, Homo sapiens
  misc_feature 15, 20: n = A,T,C or G
agcccctgccatcgnacctnggaggaccactctctgtggcaccctggactacctgccccctgaaatgattgaaggtcggatgcatgatgagaaggtggatctctggagccttggagttctttgctatgaatttttagttgggaagcctccttttgaggcaaacacataccaagagacctacaaaagaatatcacgggttgaattcacattccctgactttgtaacagagggagccagggacctcatttcaagactgttgaagcataatcccagccagaggcaactgctcagagaagtacttgaacacccctggatcacagcaaattcatcaaaaccatcaaatttgccaaaacaaagaattcagctagcaaacagtcttaggaatcgtgcagggggagaaatccttgagccagggctggccatataacctgacaggaacatgctactgaagtttattttaccattgactgctgccctcaatctagaacgctacacaagaatatttgttttactcagcaggtgtgccttaacctccctattcagaaagctccacatcataaacatgacactctgaagtgaaagtagccac

SEQ ID NO: 12301 - DNA, 579 bp, Homo sapiens
ggggccgcaccccaatgtcatcaccctgcacgaggtctatgagaacaagacggacgtcatcctgatcttggaactcgttgcaggtggcgagctgtttgacttcttagctgaaaaggaatctttaactgaagaggaagcaactgaatttctcaaacaaattcttaatggtgtttactacctgcactcccttcaaatcgcccactttgatcttaagcctgagaacataatgcttttggatagaaatgtccccaaacctcggatcaagatcattgactttgggttggcccataaaattgactttggaaatgaatttaaaaacatatttgggactccagagtttgtcgctcctgagatagtcaactatgaacctcttggtcttgaggcagatatgtggagtatcggggtaataacctatatcctcctaagtggggcctcccatttcttgagacactaagcaagaaacgttagcaaatgtatccgctgtcaactacgaatttgaggatgaatacttcagtaataccagtgccctagccaaagatttcataagaagacttctggtcaaggatccaaaagaatgac

SEQ ID NO: 12302 - DNA, 789 bp, Homo sapiens; identical to SEQ ID NO: 3703

SEQ ID NO: 12303 - DNA, 747 bp, Homo sapiens
gataatttatgattttattgtctttcctttgtccggcctttaacatgtttctgtaatttaaataaaaatctatttactttctccattttagcaaatggtttctttacccaaataggttgcactatagtccccatatggttttctactgttccacaaccactatttcacaaagattgacaaaactttaataaaagttaaatttacagacatcttaagataacttgggaaatatgtagtaaaaaagaatcgagtccacaaattaagaatattttgctaatatgcccaacaccaatttcagcaaatccaatctacttaactcatatatttaatgtggtaatttttctaacaaaatttaatggggggatgaatgatatattaatgcccttgacaaagatgacatgtgtgattttgttgtgactaagaaaggagagtatgatttctggtggttatgatatcactctggctcatcgaagctcacagaatatgtaaggttctgccacgttcaaagatgttaggcaaatgtaatagaaggcgcaccgggctgacacacgttttcatcatacaaatctttctgcagttcctcttcatctccatcaggaaaattatgtagggaatgggagatttttaccgagatccttaaatggccggcagtttaaaatcttttgacctttacctaagccatttttatggtccaggtccagaccatttaacataggatattggtggggccttggttaattcctccac

SEQ ID NO: 12304 - DNA, 607 bp, Homo sapiens
ccaagaattcggcacgaggcaggacacttctgagtacatcatttcatgtcatcctgttggcactgatgaagaacccttacagttcagggttcctggaacttctaccagtgccactctgacaggcctcaccagaggtgccacctacaacatcatagtggaggcactgaaagaccagcagaggcataaggttcgggaagaggttgttaccgtgggcaactctgtcaacgaaggcttgaaccaacctacggatgactcgtgctttgacccctacacagtttcccattatgccgttggagatgagtgggaacgaatgtctgaatcaggctttaaactgttgtgccagtgcttaggctttggaagtggtcatttcagatgtgattcatctagatggtgccatgacaatggtgtgaactacaagattggagagaagtgggaccgtcagggagaaaatggccagatgatgagctgcacatgtcttgggaacggaaaaggagaattcaagtgtgaccctcatgaggcaacgtgttatgatgatgggaagacataccacgtaggagaacagtggcagaaggaatatctcggtgccatttgctcctgcacatgcttt

SEQ ID NO: 12305 - DNA, 472 bp, Homo sapiens; identical to SEQ ID NO: 2515

SEQ ID NO: 12306 - DNA, 495 bp, Homo sapiens
ccaagaattcggcacgagggggtggcacagtgaaatttatttgtctttatgatttacacataataattaaacacacaaaagaaaaaacactgtcaagatggccatatgtagcttaggaaatgactggtcccaatgcaatcatataaatgttcattcagcgtaaaaatgagtttctttttaatggttttaatcttttttttttcagtccccaaggcttgtaccactcagtacaaatgtttttgctactgggttatcatcaggaacatgatgtttaccaattcccaggaaatgaataaaatcaacagaaacatcctgggcatgtaccattgtcactttttgacctctgcctaattgtagggcaaaatcttaggattaaaaatatccaaatattccttcaattcctagtggtttcttggtctccagaatagttaaaaacagagaggaaattagactcaaaagttttgctgccttcttttctttgcatccatcgcatcc

SEQ ID NO: 12307 - DNA, 213 bp, Homo sapiens; identical to SEQ ID NO: 3706
  misc_feature 84: n = A,T,C or G

SEQ ID NO: 12308 - DNA, 211 bp, Homo sapiens
  misc_feature 85, 101, 123: n = A,T,C or G
ctcgagccgaatcggctcgaggcctcggtgatgtcgtgggttcaagcagcctccttgatccagggccctggagacaaaggggacntgtttgacgaagaagnagacgagtcgctcctggcgcangggaatggcagagtaacatgcaaagacgagtcaaagaaggttatagagatggaatagatgctggcaaagcagttactcttcaacaggg

SEQ ID NO: 12309 - DNA, 244 bp, Homo sapiens
  misc_feature 35, 36, 65, 155, 183, 186, 188, 201, 225, 241, 242: n = A,T,C or G
gtgcagacccctgtaactcctgaacctgggcaggnngggaccccgctccccaacacctgtatttncctcaatgctgccaccatgcctgaatgcctgcagcccaggaggcccgcacaccggtacactcgtggacacctacacactccataggagancctggctttccagggtgggcaagggcanggntntggcttggagccngggaccttgggggtgtagggtaanccctgagctgggcctnntt

SEQ ID NO: 12310 - DNA, 353 bp, Homo sapiens; identical to SEQ ID NO: 3708

SEQ ID NO: 12311 - DNA, 238 bp, Homo sapiens
  misc_feature 138: n = A,T,C or G
agaccatggtgagaaaaaccagaagcttgaagaccatgctccaggtccagttcctgttccaggtcccaaaagccatccttctgcatcctcgggcaaactgctgcttccacagtttgggatggtcatcattttaatcantgtttctgctataaatctctttgttgctctgtagtttgatgcattgtttatctttcttattctttacttgaaataactatagggatccacaggagatcaa

SEQ ID NO: 12312 - DNA, 152 bp, Homo sapiens
gccgcccttttttttttttttttttttttttttttttttttttttttttttttttttttcttttttttggggggggaaaaaaaaaaaaaaaaaaaaaaaaaaaaaaggggggggggggcaaaaaaaaaaaaaaaccccgggggggggccaac

SEQ ID NO: 12313 - DNA, 207 bp, Homo sapiens
ggccgcccttttttttttttttttttaaaaaaggaccttttgcttttgggccccaggggggaagcaaagggcttggttttggccaccccaaatttttgcctttggggttaaggcaattcccccccccaaaaaggaaaaaaaggggcggggccggggggtttttcccggtaaagccacttccctcccttttttaaaaaaaaaaccggg

SEQ ID NO: 12314 - DNA, 247 bp, Homo sapiens; identical to SEQ ID NO: 3709

SEQ ID NO: 12315 - DNA, 50 bp, Homo sapiens
aagtttttggatggcagcgatctcaccctggctgactgcgacctgttgcc

SEQ ID NO: 12316 - DNA, 136 bp, Homo sapiens
gagcttgagaaagccctggggatgaagctgccagaaacgaacctctttgaaactgaagaaactcgcaaaattcttgatgatatctgtgtggcaaaagctgttgaatgccctccacctcggaccacagccaggctcc

SEQ ID NO: 12317 - DNA, 611 bp, Homo sapiens
gccagcagcagccctgcggagcccactcagcaaccatgctcagagacagctgcccggctcgagccctgacctcatctccacagccatggctgcagactgctggagaagttctgagcctgacaagggccaagctggtccctggggctgttgccaggctgacgcttatgacccctgccttcagtgcaggccagaacagtatgggtccttagacataccctctgctgagccagtggggaggagccctgacctttccaagtcaccagcacataatcctctcttggaaaacgcccagagttctgagaaaacggaagaaaatgaattcagcggctgtaggtctgagtcatccctcggcacctctcatctcggcacccctccagcgctacctcgaaaaacaaggcctctgcagaagagtggagatgactcctcagaagaggaagaaggggaagtagatagtgaagttgaatttccacgaagacagaggccccatcgctgtatcagcagctgccagtcatattcaacctttagctctgagaatttctctgtgtctgatggagaagagggaaataccagtgaccactcaaacagtcctgatgagttagctgataaacttg

SEQ ID NO: 12318 - DNA, 604 bp, Homo sapiens
  misc_feature 435, 487, 497, 551, 562, 580, 585, 591, 597: n = A,T,C or G
ctttggagccggccccaggcagcgtgtgtcggtcgcctaggctggagaactagtcctcgactcacggtgagggaatggaccgacacgggtattgtaccgctgagggaaaggagcgggactccggacctccaggagtgcaaggatgatgctgaaaggaataacaaggcttatctctaggatccataagttggaccctgggcgttttttacacatggggacccaggctcgccaaagcattgctgctcacctagataaccaggttccagttgagagtccgagagctatttcccgcaccaatgagaatgacccggccaagcatggggatcagcacgagggtcagcactacaacatctccccccaggatttggagactgtatttcccatggcttctctcgtttgtgatgcaggtgaagacattcagtgaacttgctgatngtaaggaaaccagcctagaatttgcattactgaaaacacagtttgctatcantatacgatantttgtatgagagaaggacaggaaaacctaagtctttgcatgttatcattctgtnaaacagactgntgatatacatatcagatnccacnttggtnaaatgncggattt

SEQ ID NO: 12319 - DNA, 593 bp, Homo sapiens; identical to SEQ ID NO: 3710

SEQ ID NO: 12320 - DNA, 346 bp, Homo sapiens; identical to SEQ ID NO: 933
  misc_feature 38, 41, 48, 333: n = A,T,C or G

SEQ ID NO: 12321 - DNA, 624 bp, Homo sapiens
tggccctcgaggccaagaattcggcacgaggataattcctgttccactttctttgatgaaacaagtaaagaagaaacaacacaatcatattaatagaagagtcttcgttccagacgcagtccaggaatcatgctggagaagttctgcaactctactttttggaattcctcattcctggacagtccggaggcagacctgccactttgttttgagcaaactgttctggtgtggattcccttgggcttcctatggctcctggccccctggcagcttctccacgtgtataaatccaggaccaagagatcctctaccaccaaactctatcttgctaagcaggtattcgttggttttcttcttattctagcagccatagagctggcccttgtactcacagaagactctggacaagccacagtccctgctgttcgatataccaatccaagcctctacctaggcacatggctcctggttttgctgatccaatacagcagaacaatggtgtgtacagaaaaactcctggttcctgtccctattctggattctctcgatactctgtggcactttccaatttcagactctgatccggacactcttacagggtgacaattctaatctagcctactc

SEQ ID NO: 12322 - DNA, 403 bp, Homo sapiens
acagatttgacaaataacaaagtctacgccgcaaaaattattcctcacagcagagtagctaaacctcatcaaagggaaaagattgacaaagaaatagagcttcacagaattcttcatcataagcatgtagtgcagttttaccactacgttcgaggacaaagaaaacatttacattctcttggaatactgcagtagaaggtcaatggctcatattttgaaagcaagaaaggtgttgacagagccagaagttcgatactacctcaggcagattgtgtctggactgaaataccttcatgaacaagaaatcttgcacagagatctcaaactagggaacttttttattaatgaagccatggaactaaaagttggggacttcggtctggcagccaggctagaacccttg

SEQ ID NO: 12323 - DNA, 432 bp, Homo sapiens
  misc_feature 400, 408, 414: n = A,T,C or G
ggcaccagtctctagaaaagaagtcagctctggttcggagaagcagcggctggcgtgggcatccggggaatgggcgccctcgtgacctagtgttgcggggcaaaaagggtcttgccggcctcgctcgtgcaggggcgtatctgggcgcctgagcgcgcagtgggagccttgggagccgccgcagcagggggcacacccggaaccggcctgagcgcccgggaccatgaacggggaggccatctgcagcgcccatgcccaccattccctaccacaaactcgccgacctgcgctacctgagccgcggcgactctggacttgtgtcgtccgcccgccacgcagactggcgcgtccaggtggccgtgaagcaccttgcacatccacactccgctgctcgacagtnaaagaaangatgtnttaggagaagctgaaatt

SEQ ID NO: 12324 - DNA, 486 bp, Homo sapiens
tggatcccccgggctgcaggaattcggcacgagctcataaacacagagctttagctccgccaaaatgaaacactcattaaacgcacttctcattttcctcatcataacatctgcgtggggtgggagcaaaggcccgctggatcagctagagaaaggaggggaaactgctcagtctgcagatccccagtgggagcagttaaataacaaaaacctgagcatgcctcttctccctgccgacttccacaaggaaaacaccgtcaccaacgactggattccagagggggaggaggacgacgactatctggacctggagaagatattcagtgaagacgacgactacatcgacatcgtcgacagtctgtcagtttccccgacagactctgatgtgagtgctgggaacatcctccagctttttcatggcaagagccggatccagcgtcttaacatcctcaacgccaagttcgctttcaacctctaccgagtgct

SEQ ID NO: 12325 - DNA, 273 bp, Homo sapiens
  misc_feature 263: n = A,T,C or G
cacacacacaccaaattgaacaaactggaaactctcactctgtgaaaagttgtattctacacatttctgcacagaccacaagcagtgttatttccctgatgtttgagttgttttgttcttttgtgtgttttgtttatttgtgtgttgtttgttggttttcgtttcttgagtttttgttttgttttcaccacatctgttatttccactagtttttttttggctgtgtcatgacaggcctcatgatgctaacagagattcttccnttcttttttc

SEQ ID NO: 12326 - DNA, 519 bp, Homo sapiens; identical to SEQ ID NO: 3717

SEQ ID NO: 12327 - DNA, 248 bp, Homo sapiens
  misc_feature 63, 215: n = A,T,C or G
gcagagttgtcgctactggagaagtccctgggactgagtaaggggaataaatacagtgctcanggcgagcgacagattccagttcttcagacaaacaatggtccaagtctaacaggattgactactatagcagctcatctagtcaagcaagccaacaaagaatatttgctggggagtactgcagaagaaaaagcaatcgttcagcagtggttagnatacagggtcactcaagtagatggggcactcca

SEQ ID NO: 12328 - DNA, 286 bp, Homo sapiens
  misc_feature 24, 47, 49, 120, 279: n = A,T,C or G
aagaaagctggccttcgacatggntaccaatgctgcctgtgcatctntnctgaaaaagaaacagggaacagatgcagttcgaacattaagcaatgccgaggactatctcgatgatgaagnctcagattaattcctttctggagctttgagatctaaaacttctgttgcttttgccattccaaaactttgtctttgccagaaaagtgttggtaactataaaggaaattatatatgaacacggcagtgttgcactgtgtttgagtagaacgtgtaaatganttgttcc

SEQ ID NO: 12329 - DNA, 585 bp, Homo sapiens
aattcctacatatatacttttatttttagtgaccacatttctttgtttcaggtgtaaaattaaaaaatatattgtacacttagcatacttggcctaccaaatcccgtctaagttctgagcacactctctcctcaaaagtatcatattcaacagcattttaaatttagagagagagtttgatgatacaggttttaaaacaaataagcatgtattgaaccaagtgatttaagacaaaatatttcaattgtttacagcttgggtatgagagggaagatgcaaatttaaggtacatttttcttctagctacgatgtatgttttacttacttgaagaccccttaaaaaaagtagcaaaatcagcagtcttgtttaatataatcaaaatattcttaaatgtacaaaaaaggatcatgtagaaagaatactgtaaaaagatactgatcttaagaataaaagattaggaaaagcttctattacattcggcccagccagttacttcggcaaatttccggttctccaggtgtgcgccagggtttcccatccccatagcgcctcggcccagagttcgcgaatgagacacgggctcg

SEQ ID NO: 12330 - DNA, 103 bp, Homo sapiens; identical to SEQ ID NO: 3720

SEQ ID NO: 12331 - DNA, 423 bp, Homo sapiens
gcgaccgcctggtggactccaaagccaagaccgaccggctgtgcgcctacatggcacccgagcgcattgaccccccagaccccaccaagccggactatgacatccgggccgacgtatggagcctgggcatctcgttggtggagctggcaacaggacagtttccctacaagaactgcaagacggactttgaggtcctcaccaaagtcctacaggaagagcccccgcttctgcccggacacatgggcttctcgggggacttccagtccttcgtcaaagactgccttactaaagatcacaggaagagaccaaagtataataagctacttgaacacagcttcatcaagcgcttacgagacgctggaggtggacgtggcgtcctggttcaaggatgtcatggcgaagactgagtcaccgcggactagc

SEQ ID NO: 12332 - DNA, 372 bp, Homo sapiens
ccaagaattcggcacgaggtctttaagtctcttttctcttttttcgcgcaaaaatgccggatccagcgaaatccgctcctgctcccaagaagggctccaaaaaggctgttacgaaagtgcagaagaaggacggcaagaagcgcaagcgcagccgcaaggagagctactccgtttacgtgtacaaggtgctgaagcaggtccaccccgacacagcagcaactccatgcaaaccatccaaaagaaccaccacccgccggatagtggatggcaaagtggtgtctgagaccaatgacaccaaagttctgaggcattaagccagcagaagcagggtaccctttggggagcaggaggccaataaaaagttcagagttc

SEQ ID NO: 12333 - DNA, 582 bp, Homo sapiens
ccaagaattcggcacgaggcttggtttttcatggtccctggcagactgggtttgtagatgaaactgaagctgccaaagtggaacgtgtgaaacaggaaaaaggtattttctgggaaccctttgctaatgtgactgtagaagaagcaaagaggtcatctttacaggtatgggctgatttcaataggggccaaactttaacaaggcaaattctgccctttttacttactgacgaaacaaaccagtgtggtttccagccttatgctgaatttcaaatcaaatagatctagacatgtaaaattctgttttatggtagttgcttttaaaattaagaagtgggactacaccatatcaaatatattctttcagtatgtttgaattattggtagtaacctttaagggaagttacatattgtaccagtgatgctataaatgcagtctttactgaaccacagaagaaaatgaaagaaactacttcctaaatgtttagtttgattccttgccttattaatcaaatgagtctcctaataatttttggcagtaactgaagatcacatctacttattaaaaggcagaacttgacac

SEQ ID NO: 12334 - DNA, 678 bp, Homo sapiens
ggaatttggccctcgaggccaagaattcggcacgagggaagttattatctcgaactgacactgagccacaacccaaacaacccagctctccctaagcttcaaactagactacttctccataatattcatccctgtagcattgttcgttacatggtccatcatagaattctcactgtgatatataaactcagacccaaacattaatcagttcttcaagtatctactcattttcctaattaccatactaatcttagttaccgctaacaacctattccaactgttcatcggctgagagggcgtaggaattatatccttcttgctcatcagttgatgatacgcccgagcagatgccaacacagcagccattcaagcaatcctatacaaccgtatcggcgatatcggtttcatcctcgccttagcatgatttatcctacactccaactcatgagacccacaacaaatagcccttctaaacgctaatccaagcctcaccccactactaggcctcctcctagcagcagcaggcaaatcagcccaataaggtctccacccctgactcccctcagccatagaaggccccaccccagtctcagccctactccactcaagcactatagttgtagcaggaatcttcttactcatccgcttccaccccctagcagaaaatagcccactaat

SEQ ID NO: 12335 - DNA, 511 bp, Homo sapiens
cccagcaacatcctgtatgtggacgagtccgggaatcccgagtgcctgcgcatctgtgactttggttttgccaaacagctgcgggctgagaatgggctcctcatgacaccttgctacacagccaactttgtggcgcctgaggtgctgaagcgccagggctacgatgaaggctgcgacatctggagcctgggcattctgctgtacaccatgctggcaggatatactccatttgccaacggtcccagtgacacaccagaggaaatcctaacccggatcggcagtgggaagtttaccctcagtgggggaaattggaacacagtttcagagacagccaatgacctggtgtccaagatgctacacgtggatccccaccagcgcctcacagctaagcaggttctgcagcatccatgggtcacccagaaagacaagcttccccaaagccagctgtcccaccaggacctacagcttgtgaagggagccatggctgccacgtactccgcactcaacagct

SEQ ID NO: 12336 - DNA, 426 bp, Homo sapiens
ccaagaattcggcacgaggtttttttttttttttttttagggggtcctgccaggaaccgggttttttgggaagggaaaaaaccctaaggaccgggggccccaaaaggttgtgggtttttgaccaaaatttgaaccaaaggaaaaacttcgcccctcttttttcggttttggttttccctcctggaggccttggccctcttttttttttaggcccggaaccacttctggaaagcggcccctctttggtcccccttggaacccaagaacctctgggccctaaccttgaagggggcccttcttttttttgaaacccgggcctttttccaatttttcccgttgttgttgttgcaattaaaaaatattttggggattttggcccatccacttggaaaggggctgttccttttccaaacctttttttttttg

SEQ ID NO: 12337 - DNA, 556 bp, Homo sapiens
ccaagaattcggcacgaggggcacatctacacagatatgtgcatgcttgatggtgcaaagaaactgctgacttccaccaacctcatgctcccgctggctggccatacagagggattcgttgtcatattgaaaaggctctgaaagatgagtttctaattgaagctcactatctcaggttggtgtttctactgtgtagtcccaagcctgtatccatatcataaaagtggaggcctggtactcctccaggttatctggccagtgtagactcctccatctgaatatgaacctccagggtaagaattgttcagacatgtctatactgaacagtacgatcctgcactttccaaatgtctgcctccttttgttcttcattgaaccattctaattcctgttaagtgtgagaagaattgtcttcagttctctctccattctcattcatgatggaatcattgatccattgaccagttgagaaatgattgatgctgaagaagtggtattctattggtaaggcttattaccaaacttccgataatgaagcacgctaccaaaaacttat

SEQ ID NO: 12338 - DNA, 543 bp, Homo sapiens
aaaggattatgtgctacaaaattgagtgccagttcagaggacatttctgagagactggccagcatttcagtaggaccttctagttcaacaacaacaacaacaacaacagagcaaccaaagccaatggttcaaacaaaaggcagaccccacagtcagtgtttgaactcctctcctttatctcatcattcccaattaatgtttccagccttgtcaaccccttcttcttctaccccatctgtaccagctggcactgcaacagatgtctctaagcatagacttcagggattcattccctgcagaataccttctgcatctcctcaaacacagcgcaagttttctctacaattccacagaaactgtcctgaaaacaaagactcagataaactttccccagtctttactcagtcaagacccttgccctccagtaacatacacaggccaaagccatctcgacctaccccaggtaatacaagtaaacagggagatccctcaaaaaatagcatgacacttgatctgaacagtagttccaaatgtgatgacagc

SEQ ID NO: 12339 - DNA, 117 bp, Homo sapiens
cacgtacatacatgatgatggcttgagtcagctgcagggcagtgggcttaatgagagggatctttgtaaagacagctcttcacttcagctcagtagctttggtcataggcaagtttg

SEQ ID NO: 12340 - DNA, 51 bp, Homo sapiens; identical to SEQ ID NO: 3722

SEQ ID NO: 12341 - DNA, 413 bp, Homo sapiens; identical to SEQ ID NO: 3723

SEQ ID NO: 12342 - DNA, 227 bp, Homo sapiens; identical to SEQ ID NO: 3724

SEQ ID NO: 12343 - DNA, 448 bp, Homo sapiens
gcctgcaggtaccggtccggaattcccgggtcgacccacgcgtccgcttcccgacaagtggcagcacgatcttttcgacagtggcttcggcggtggtgccggcgtggagacaggtgggaaactgctggtgtccaatctggattttggagtctcagacgccgatattcaggaactctttgctgaatttggaacgctgaagaaggcggctgtgcactatgatcgctctggtcgcagcttaggaacagcagacgtgcactttgagcggaaggcagatgccctgaaggccatgaagcagtacaacggcgtccctctggatggccgccccatgaacattcagcttgtcacgtcacagattgacgcacagcggaggcctgcacagagcgtaaacagaggtggcatgactagaaaccgtggcgctggaggttttggtggtggtggaggcacccgg

SEQ ID NO: 12344 - DNA, 247 bp, Homo sapiens
  misc_feature 68, 100, 169: n = A,T,C or G
aaacagctggacgacctgaaggtggagctgtcccagctgcgcgtcgccaaagtgacaggcggtgcggnctccaagctctctaagatccgagtcgtccggnaatccattgcccgtgttctcacagttattaaccagactcagaacctgaagaccaagaagcagcagcggnaggagcggctgtacccgctgaggaagtacgcggtcaaggcctgaggggcgcattgtcaataaagcacagctggctgag

SEQ ID NO: 12345 - DNA, 92 bp, Homo sapiens
ctccagcccaagatgattccagcagtggtcttgctcttactccttttggttgaacaagcagcggccctgggagagcctcagctctgctatat

SEQ ID NO: 12346 - DNA, 184 bp, Homo sapiens
ggccgccctttttttttttttttctttggaaattggttttttaacgggggggttaaaaggggaaggaaaaaaaaattttggggaaaagccctcaataccccattttccccccggggttttttttccaaatggaacaagggaaggtaaacctgggggaagggaattttaaggggggccctttttt

SEQ ID NO: 12347 - DNA, 177 bp, Homo sapiens
aaaaaggagtccatccacagcatccaaggatccatagtgtcccctcacactgcagccaccaatggaggctactcccgaaagaaagatggtggcttcttctccacctagtgttgacagatccctgaactaattatagtgaaacatactgcggcccacttccattaaatagatttgtgc

SEQ ID NO: 12348 - DNA, 267 bp, Homo sapiens
gcttggtaactactttcctctgccaggctatgggaaagaggatgtaattgtgaataatatacaccatccagtctttaatgtgctgcaacaatgtagtaatttgtttttttcatttgttcccactgcctttgtgtacatagaaaacttaaaaatttcccccagtctattagaagttaagatgttccctaatttattaaatatgcctttattcacaatttgtttttttaggttattcttaatgcattatagaattaagtatgactttgt

SEQ ID NO: 12349 - DNA, 373 bp, Homo sapiens
ggccgccctttttttttttttaaaaaaaaaaccccttttttttttttccccttttagggggggaaaaaaaaccccttttttaatggaaaaaggggggacccgggtttccccttttttttaaagttttaaaaaccccccttgaaaaccccccccggggggttttaaaaacccccccaagaatttcaacccccgttttccgtttacttttccaagggggtaaaacccaaattttttttccccttttccttcctcggggcttttttatttttttccgtttttttttaaagggctttggaaaaccccggggcaatttttggggaaaacctttttttgggggaaaaaaaaaggtttgggccccccttttaggggggtt

SEQ ID NO: 12350 - DNA, 239 bp, Homo sapiens
  misc_feature 73, 117, 208, 211, 221: n = A,T,C or G
tgcctcctcgctggccgcgctccctcccggtgccggcttctctgagtcaccaacctgaggctgccccggccgnctgcgcacccggcagcaccatgacagatcaggcctttgtgacantaaccacaaacgatgcctacggcaaaggtgccctggtcctgggatcatctttgaaacagcacaggaccaccaggaggctggtcgtgcttgncancccttaggtnttagacttcatgagaaaa

SEQ ID NO: 12351 - DNA, 217 bp, Homo sapiens
  misc_feature 10, 14, 35, 52, 59, 126, 154, 187, 201: n = A,T,C or G
gataattgangatntcctaagcccagatacctgtntatgtgggacagatganggccgantcctggaagcctgagggaagacatgctggagaccctggttcccaaggcagagggtgaccgtttgatngtggtgctgggcccacagactggaaggntgggacatttgctgagccgggacagagcacggngccgggctttggtncaactgccaagagaaa

SEQ ID NO: 12352 - DNA, 266 bp, Homo sapiens; identical to SEQ ID NO: 944
  misc_feature 25, 37, 169, 186, 225, 244, 252, 264: n = A,T,C or G

SEQ ID NO: 12353 - DNA, 522 bp, Homo sapiens
aaaaataactaaacatgggcaaaggagatcctaagaagccgagaggcaaaatgtcatcatatgcattttttgtgcaaacttgtcgggaggagcataagaagaagcacccagatgcttcagtcaacttctcagagttttctaagaagtgctcagagaggtggaagaccatgtctgctaaagagaaaggaaaatttgaagatatggcaaaagcggacaaggcccgttatgaaagagaaatgaaaacctatatccctcccaaaggggagacaaaaaagaagttcaaggatcccaatgcacccaagaggcctccttcggccttcttcctcttctgctctgagtatcgcccaaaaatcaaaggagaacatcctggcctgtccattggtgatgttgcgaagaaactgggagagatgtggaataacactgctgcagatgacaagcagccttatgaaaagaaggctgcgaagctgaaggaaaaatacgaaaaggatattgctgcatatcgagctaaaggaaagcctgatg

SEQ ID NO: 12354 - DNA, 499 bp, Homo sapiens
ataaagctcagtggtggtgttacctcaccggggaccagggtcacacagcaaagctggaacaacagaggcgtgttgtgggggagcctcagaggggacaaaacctctgcctgagatcccaccccaggtgggcatgggggccactgaggttggggatgaaaatgccggtaccgtcagtgcacagccctgttccagacagtgctgcctggaagatttctgggctctcctgaggcgccaccccgcacctgagccacctccttggactcctgtcctctaccccttgaggacctccctcccttctaccctagctgtcttcttgaacttgggactctcctttcccaagacttccatcactagctcctggagggactggactttgcatcttcccttcgcgtggagcctcagtgtgagaggccctagccaatgcgtgcatgtcagaggtggtggggaccacatcagaagaagaggggggtgatgaaattaacaaataaaaagtatgggg

SEQ ID NO: 12355 - DNA, 255 bp, Homo sapiens
  misc_feature 72: n = A,T,C or G
tcctgaagatcgcagactttggactctgcaaggaagggatcggcttcggggaccggactagcaccttctgtngcaccccggagttcctggctcccgaggtgctgacccaggaggcatacacacgggctgtggactggtgggggctgggtgtgctgctctacgagatgctggtgggtgagtgcccgttcccaggggacacagaggaagaggtgtttgactgcatcgtcaacatggacgccccctaccccggcttat

SEQ ID NO: 12356 - DNA, 466 bp, Homo sapiens; identical to SEQ ID NO: 3725
  misc_feature 4, 75, 79, 450: n = A,T,C or G

SEQ ID NO: 12357 - DNA, 463 bp, Homo sapiens; identical to SEQ ID NO: 3726

SEQ ID NO: 12358 - DNA, 399 bp, Homo sapiens
aagaattcggcacgaggaaaatttcactgagttttagttcattcttctttctctgaaaggagaggaaatcgcctccaggaaccagttccttaatgacgtagataggccgtctttgtgtgtgaactcctatacttttgacattactgggatgattatattgcttgaggattttggcttctagtaaaaattttaatttcagttcctggggaagacgttcttgacgtgttttaacagcaacagcaattttatcctttaatgtgaccttaaatgtgtcaccaaaatttcccttgcctcttgtaacgtggcacctttatgattgagaacccatttcttattctcctaatggccatactgtgataccatgatgctcttaattggaacattgactttttttttttt

SEQ ID NO: 12359 - DNA, 359 bp, Homo sapiens
agggaatttggccctcgaggccaagaattcggcacgaggaattattaaagatcttttttttttttctttttaatccatttaatttaaaaattttcatttggaactactttaaagcttacaaaattttttttaaaaaaatcaagatttcctattttttcttaacccagttttttgactgctaacaccatttttaagagtccagttcctcactttgggaaatggatccagaattagttccttacctacagaccttatttacatatttggtccagggtcccactaaggttttttacctgggatcaaaatcggggtcacatatggcatttatcggctacatttctttagttttctttattcgg

SEQ ID NO: 12360 - DNA, 585 bp, Homo sapiens
taccggtccggaattcccgggtcgacccacgcgtccggtttcgtcatgttgcctaggctggcctcaaactcctggcctcaagcgatcctcccacctcggcctcccaaagtgttgggattacaggcatgagtcaccatgcccaggctaaagctgttatttcctcataacctttactgcacatgttttaaaacaggtccttatcattgtttgccccagcaactggaatagctttctatctgctttcaatcttaacccagtctcaccagggcatataatctttctagaatgcaaatctgatcattttacttgaaggcttaagttttgcagtgacatactttagagcagcactgtctgataggaatagaatgttagcttcatgtatacagatgctccttgacttaggatgggtttatgtcccaataaatccaccataagttgaaaatattgtaagtaaaaaatgcatgaaatacacataccctactgaatatcatagcttagccaagcctaccttaaatgtgctcagaacactgatgttaacctacagttgggaaaaatcatcttacacaaaccctattttataataaa

SEQ ID NO: 12361 - DNA, 465 bp, Homo sapiens; identical to SEQ ID NO: 946

SEQ ID NO: 12362 - DNA, 273 bp, Homo sapiens
aaaaataagatgaagttagacaactttagattttgtgtggtgtgtacatctatgtgcacagtatgtaaattatcttttattgtattgcttaatagaataaagaagtagaaatttaattcctgtgtgtctatacaatattatagcacatcataaacttaaaaccttatttaaatattcctttctgaattctttcctgtaatcatacatgtatcatcaggtatttgacttgtgctggagtttgaatttgtgatatctgtattctgtagttttatc

SEQ ID NO: 12363 - DNA, 144 bp, Homo sapiens
ggacttacggatgtctccccagaaacaaccaccccggagcccccgtcttccgctgcagtttccccgggaacagaggaacctgctggcgacaccaagaaaaaaattgacattttgctaaaggctgtgggagacactcctattatg

SEQ ID NO: 12364 - DNA, 102 bp, Homo sapiens
gcttccccaactaaagcctagaagagcttctgaggcgctgctttgtcaaaaggaagtctctaggttctgagctctggctttgccttggctttgccagggctc

SEQ ID NO: 12365 - DNA, 335 bp, Homo sapiens
  misc_feature 20, 21, 41, 53, 78, 153, 188, 222, 229, 238, 257, 260, 266,278, 302, 320, 329: n = A,T,C or G
tctcagaggcagcgtgcggnngtgctctttgtgaaattccnccatggcgtacngtggccagggtcagaaagtgcaganggttatggtgcagcccatcaacctcatcttcagatacttacaaaatagatcgcggattcaggtgtggctctatgngcaagtgaatatgcggatagaaggctgtatcattngttttgatgagtatatgaaccttgtattagatgntgcagangagattcanttctaaaacaaagtcatgnaancaactnggtcgggtcatnctaaaaggagatactattactctnctacaaagtgtctccaantagaaatgntcactg

SEQ ID NO: 12366 - DNA, 405 bp, Homo sapiens
aaaaaagagtaaatcaaaaaaagggaaacatcacaaaaaggaaaaaaagaagagaaaaaaggaaaagcattcttctacacctaatagttctgaattctccagaaagtaactgagactttggcttaagccgttaaatttaaaaatttgtttttaaaacgtgtttgcccttccttggaatttgctatatattatgctttgcaataaatcacagccttttccatatagacatttttcgtatttgggaccattatccctctggcaatatatttttaatgtgctgtaactgtaaagtattaaatcagtcttgttacttgatagccatgccccaagtatagctatttgtgtatactaaacacatcatttttggtatttgtgtctctgtgtgtttggctagtgttactactt

SEQ ID NO: 12367 - DNA, 650 bp, Homo sapiens; identical to SEQ ID NO: 950
  misc_feature 637: n = A,T,C or G

SEQ ID NO: 12368 - DNA, 358 bp, Homo sapiens
  misc_feature 287: n = A,T,C or G
ggcaacctaggtgtccgcgggatggcgctcttcttctactctcatgcctgcaaccggatttgcgagacatggggccttgctccctttgacctctcgccccgggagagggatgcagtgaatcagaacaccaagctgctgcaatcagccaagaccatcttgagaggaacagaggaaaaatgtgggagcccccgagtaaggaccctctctgggagccggccacccctgctccgtcccctttcagagaatctgggagacgagaacatgagcgacgtgaccttcggattctnttcccttctttccccatctttgggccacaccacacaggccaggaagctaggaccacttccattgggccatt

SEQ ID NO: 12369 - DNA, 495 bp, Homo sapiens
  misc_feature 6: n = A,T,C or G
gagatngatgaataagaagtgacattgagctgacccggcagttctgtttgaactcaaacatatgagagatgttcagttcaaccatctcactcgcttcattggcgcctgcatagaccctcccaacatttgcattgtcactgaatactgtcctcgtgggagtttacaggatattctagaaaatgacagcatcaacttggactggatgtttcgttattcactcattaatgaccttgttaagggcatggcctttctccacaacagcattatttcatcgcatgggagtctcaagtcctccaactgtgtggtggatagtcgttttgtgctcaaaatcacagactatggcctggccagcttccgatgcaactgctgaacctgatgacagccatgccctctatggccaaggaagctgtgggactgccccaggaactggctcagtggggaaccccttggccaaccacagggctggcagaagggttgacgtctattaggtttggt

SEQ ID NO: 12370 - DNA, 483 bp, Homo sapiens
  misc_feature 10, 424, 435, 452: n = A,T,C or G
actgtgaagnttagtgtggagaggagttaataagctgggtgacagaaatgctgggtcttggtcctttaaagacaaggattcctgagctgttttaaccagtgcctgagttggagtcctttgggggaaaagctatgtggggactgaagaatggactcattcataactaatgaaagggacagcctggcccctagatgtctgtgaggcctgtcatatggtgataaatgcacttttgtcatatggtgatacatgtaggccccagaggtgatccgaatgcaggataacaacccattcagtttccagtcggatgtctactcctatgggcatcgtattgtatgaactgatgacggggggagcttccttattcttcacatcaacaaccgagatcaggtaagtctgtgctgggtgcgaaaggacccaactcgtngggagcccctngggccttccgccagccntaagcagctagaagggttagggatttgttat

SEQ ID NO: 12371 - DNA, 580 bp, Homo sapiens
ggccctcgaggccaagaattcggcacgagggagaaaatagcacctcacttccagaaagctttaagacaaaagctggagtcccaaataaaccaggcattcccaaattactagaagggagtaaaaattcaatacagtgggagaaagctgaagataatggatgtagaattacatactatatccttgagataagggactgaaaacacaccgtcgatgaaaaccagccactgatgaacagcctcagacctggccagtacggggagcacgtgaaccataactggcttagaaggactgatttcatgccaacttgaggggagaattccaaattccaaagacactcctctcacaggactatgaaaccatcttttaagaagttccaaggacaaaagtcacttccataattatagtcctggcaacttgatctttagatctatttttgcttcatctggctctggcattcccataaccttaaaaaatgttcctgttcatactagagaattcccttggcccttatttctaattgaaacctccttgaagtttctgttgctgcttttcatgcagagtgaaatacattctaacctgc

SEQ ID NO: 12372 - DNA, 400 bp, Homo sapiens
  misc_feature 263, 291, 349, 395: n = A,T,C or G
ttatgaaaacaaaaaatatttgtacctggtgctagaacacgtgtcaggtggtgagctcttcgactacctggtgaagaaggggaggctgacgctaaggaggctcggaagttcttccggcagatcatctctgcgctggacttctgccacagccactccatatgccacagggatctgaaacctgaaaacctcctgctggacgagaagaacaacatccgcatcgcagactttggcatggcgtccctgcaggttggcgacactgtttngggagaccagctgtgggtccccccactnacgcctgccccgaggtgatccggggggagaaagtattgacgggccggaagggaacgtngtgggagcttgcggcttcattcctgtttcgccttgctggtgggggnttgcc

SEQ ID NO: 12373 - DNA, 451 bp, Homo sapiens
  misc_feature 433, 447: n = A,T,C or G
aactgtacaaaataatttaatgtttacaaaaatattagaatgtttagttgactgacacagtcttaagtaatctcttctagagaagtatatagtaagaccactgattcccatttcatttcttttttaataagtcaaagaaaggatgctgcaatgcttcatccaaggtaattctttgagttggatcatattctaacattcttcgaaccaggtcaaacagtttctcatgttcttcatcatgacaaagcataaattccttcaacggtttgcagcgtctcctaacatatctaccaggcaggaactgtgttcatcccaatctaggctgggttatgggtgaaaatacttgcgttttcttgttttctggaatcatgtgttgtgggtatggggtcctaatatttcgttcccttcattggccggggggctctttaactatccnggaggtctaaaacntgta

SEQ ID NO: 12374 - DNA, 543 bp, Homo sapiens
agaattcggcacgagggtaatcccagataaaataccttctttgaataccatgttaattcggggtaagcaaatgttctcaaataggagttgacacttacccttctactgcagtattccaagagaatgtaaatgttttctttgtcctcgaagtagtggtaaaactgcactacatgcttatgatgaagaattctgtgaagctctatttctttgtcaatcttttccctttgatgaggtttagctactctgctgtgaggaataatttttgcggcgtagactttgttatttgtcaaatctgtcatctcgtaacattttgcaaagccaccctttcccagcactttgccccggcagtagcgcttcccagtcgtggggtcgacgataatccgcgagatctccggccccgagtgcgaatggtggtgatggtggtgaggggccgccgggggcacttgcgcctgggactgaggtggctgcgattcctcggggggctgcggcggccgcaagcttattccctttagtgagggttaattttagcttggcactggccgt

SEQ ID NO: 12375 - DNA, 479 bp, Homo sapiens
  misc_feature 456: n = A,T,C or G
aaagtgacacaaaagttttatgatcagtaacactccatgtctccagaattatatccctaggaggtggaatgccaaaaaacatttctgttttgaacaccatgatacacagcagaaggaggggggaaaaacacgtagatattgcccttcggcttaaaatccagtcctgctcaaatgacatcacttaaaatacccttgatggagctcaaagctggtcctttcttccaagatgggatgcctgggaacaatgattccttcccaataatcctagtgcagtgtcatttgtacagtgggtttccttaagaggtcctgggtgcagagatgtcagcagtatttctgatcagggcccatagggcatgccagacatggggcatggggggtttcatgtttcatctggtccccatgtggaccacttgcttgccctttcatggtggcaccatacttttacacttgcagggnttccctggggtggggggcaactt

SEQ ID NO: 12376 - DNA, 664 bp, Homo sapiens; identical to SEQ ID NO: 954

SEQ ID NO: 12377 - DNA, 62 bp, Homo sapiens
tattttatcggggccagctcaaccatttaaagtatttgccaaataaagaatgcatttaggtt

SEQ ID NO: 12378 - DNA, 424 bp, Homo sapiens; identical to SEQ ID NO: 3734

SEQ ID NO: 12379 - DNA, 598 bp, Homo sapiens; identical to SEQ ID NO: 3736

SEQ ID NO: 12380 - DNA, 214 bp, Homo sapiens
aaaatacttctacagtgacaaagaaaaatcaagaacaaagctttttgatatgtgcaacaaatttagaggaagtaaaaagataaatgtgatgattggtcaagaaattatccagttatttacaaggccactgatattttaaacgtccaaaagtttgtttaaatgggctgttaccgctgagaatgatgaggatgagaatgatggttgaaggttacat

SEQ ID NO: 12381 - DNA, 247 bp, Homo sapiens
gggaggtggtcagtgggacttagggatctttcacctgctgtgcccagtagttctgaagtctgcttgtggagcagtgttttatgtttatccctgtttactgaagaccaaatactggtttggagacaacttccatgtcttgctcttctacctccctagttagtggaaatttggataagggaactgtagggcccagattctggaggttttatgtcattggccacagaataactgtctctaagctatccat

SEQ ID NO: 12382 - DNA, 212 bp, Homo sapiens
  misc_feature 9, 44, 94: n = A,T,C or G
ctgggattngggggtgcagtcctgggggtggggctcagcctggnccctgtccccctcactccctgggtgtttggggtcactgctggggtcttcntctatgtggcccttgtggacatgctaccagccctgcttcgtcctccggagcccctgcctacgccccatgtgctcctgcaggggctggggctgctgctggggggcggcctcatgcttgc

SEQ ID NO: 12383 - DNA, 480 bp, Homo sapiens
ggcggcggcggcggagccggacgggcactgggcgactctgtgcctcgctgaggaaaaataactaaacatgggcaaaggagatcctaagaagccgagaggcaaaatgtcatcatatgcattttttgtgcaaacttgtcgggaggagcataagaagaagcacccagatgcttcagtcaacttctcagagttttctaagaagtgctcagagaggtggaagaccatgtctgctaaagataaaggaaaatttgaagatatggcaaaagcggacaaggcccgttatgaaagagaaatgaaaacctatatccctcccaaaggggagacaaaaaagaagttcagggatcccaatgcacccaagaggcctccttcggccttcttcctcttctgctctgagtatcgcccaaaaatcaaaggagaacatcctggcctgtccattggtgatgttgcgaagaaactgggagagatgtggaataacactgctgc

SEQ ID NO: 12384 - DNA, 392 bp, Homo sapiens
gaaactcacagagaaaaaaaactaatacaaaacactgaaaagagcatcaaggggccgggcacagtggctcacgcctgtaatcccagcactttgggaggctgaggtgggtgtatcacctgagtgcaggattttgagaccagcctggccaacatgacaaaaccccatctatactaaaaatacaaaaattcaccaggcttggtggcaggcgactgtagttccagctactgaagaggctgacgcatgataatcacttgaacctgggaggaggaggctgcagtgagctgagatggcaccactgtactgcagcctgggtgacagaccaagactccatctcaaaaaaaaaaactccatctaaaaaaaaaggcggccttttttaaaaaaccccccccttt

SEQ ID NO: 12385 - DNA, 437 bp, Homo sapiens
gcttctctcttcctcggcgctgcctacggaggtggcagccatctccttctcggcatcatggccgccctcagaccccttgtgaagcccaagatcgtcaaaaagagaaccaagaagttcatccggcaccagtcagaccgatatgtcaaaattaagcgtaactggcggaaacccagaggcattgacaacagggttcgtagaagattcaagggccagatcttgatgcccaacattggttatggaagcaacaaaaaaacaaagcacatgctgcccagtggcttccggaagttcctggtccacaacgtcaaggagctggaagtgctgctgatgtgcaacaaatcttactgtgccgagatcgctcacaatgtttcctccaagaaccgcaaagccatcgtggaaagagctgcccaactggccatcagagtcaccaaccccaatgc

SEQ ID NO: 12386 - DNA, 504 bp, Homo sapiens
agagtctcactcagtcacccaggctggagtgcagtggtgcaatctcggctcactgcaagctctgcctcctgggttcacgccattctcctgcttcagcctcccgagtagctgggactacaggtgcccactaccacgcccagctaattttttgtatttttagtagagacagtgtttcaccgtgttagctaggatggtcttgatctcctgacctcgtgatccacccaccttggcctcccaaagtgctgggattacaggcgtgagccaccgcgcccagccaggaagacattttagtaaccttagcatcattcttttctgccaggatccagaagcaccgtccttgtacctacataaggaaaatacactgctgggacccagcaaggtatagatcaggggtgtccaatcttttggcttccctgggccacattggaagaagaagaattgtcttgggccacacataaaatactaatgatagctgatgagatagaagaaaaatcaccaaaaaat

SEQ ID NO: 12387 - DNA, 377 bp, Homo sapiens
attttgttcagatgttgactctccgggggcactggctcattccaagactgttcttgtgcaactctcagaataccttatttgagcatacctgttttgaaaggcattttctttttatagttaggtgtagtgcttaagggttaatttattttcatgttatgccagtaatatagtgttgtatgcctattgagtgattgtggcaagaaaagctacagcttctttgcgtttaactttttcaaaccacagaccagaactggttgcatgttactttaggagttgtgggttggtaagctcccacgtacttcccgaggctatggtgtgagatcccccgtcctgccctttggggctccacaggcccctggcaaggcccgtggcttaag

SEQ ID NO: 12388 - DNA, 178 bp, Homo sapiens
cagaaggggaagaggtggggaggaagaggaggaggaagaagaaggtgatggtgaggaagaggatggagatgaagatgaggaagctgagtcagctacgggcaagcgggcagctgaagatgatgaggatgacgatgtcgataccaagaagcagaagaccgacgaggatgactagacagcc

SEQ ID NO: 12389 - DNA, 410 bp, Homo sapiens
gagacacagtctcactccatcgcccaggctggagtgcagtgatacaatcttggctcactgcaacctccacttcccaggttcaagtgattctgcctaagcctcctgagtagctgggattacaggcgtgcgccaccacacccagctaatttttgtatttttagtagagacagggtttcaccacgttggccaggctggtctcaaactcctgacatcaagtgatccacctgcctcttcctcccaaagtgctgggattacaggcgtgagccaccatgcccggcctaaaatcattttattgaatatgaagtttagctttcatttcatttatcccccaagagtttcttattctctatttggtcatttttcatatcattttactcttatcctctagatgcagtatcttatatctctca

SEQ ID NO: 12390 - DNA, 53 bp, Homo sapiens
atgcctcatggactctgctaaaaaaaaaaaaaaaaaaaaaaaaaagggttttt

SEQ ID NO: 12391 - DNA, 426 bp, Homo sapiens
gaatttggccctcgaggccaagaattcggcacgaggtttttttttttttaaaaaaatcctctagggaacacagtcaaaagagatttcaatggggggcattctcttggtttgggggggaacaagtattttgggctgctgaaaaagagtgccctgccccacaggggagaccctttctttaccctaataggggggatccagttttttttataaatgggactctcccaggtcccacaaaacaataattttttttgaacaatgggcacatgagagggtttttggcatttaaaccgggaaaaggcggggctggaggggaaaaaaaaatatttaacccttggatgaccggaaaaatatagggctggaaacccattttaaagggtacttttcttttagggacatataactgcacagctgaaaataaagggggaa

SEQ ID NO: 12392 - DNA, 306 bp, Homo sapiens
gctcagcaaggggtggaccactgcccaggggctgggcagaaggccgttgtccagctggccgagaccacccaagagaccatcgacaagactgctggccaggcctatgacaccttcgtctgggcattgggaaaaaattcggcctcctgaagatgacagcagggagacttgggtcggcctactgaaatgacagcagggagacttgggtgaccccccttccaggcgccatctagcacagcctggccctgatctccgggcagccaccaccttctcgggctgccccctcattaaaattcacgttcccaaaac

SEQ ID NO: 12393 - DNA, 656 bp, Homo sapiens
  misc_feature 8, 54, 532, 545, 561, 588, 597, 622: n = A,T,C or G
gccagggntcttgggccttcagccacagactgaaggctgtactgtcagcttccntacttttgagattttgggacacgtactggcttcctggctcctcagcttgcagacggcctatcatggtacttcaccttgtgatcatgaccactggtatagcttgcctggtggtggacttggaggataccattgcattagggcatttctccacatgatagctcctgcctgctggacaggtcgtctcttgactatgtgtattctccagagaagcagataatggctcttgtaggaatgaggcttttaggcacttggctgaatgtggatctcatctccttgcacctgggctgtgctgcacagaattcccacaaagactttcacagaaaagaaatacctcaggttgtactgctggcatatttggtttcccatcaaggtccttaacatttataaaaattggattaaaataactaacgaattaaatatgaatatgaaaataaacagctgttttcatggaaattgcattgatgtggatcctctgaangcatgtccctaangaacctgccaacaaantctgtaaagccgaatggacattctggnaatttatgncctgtgtagaagctagaaaaaaaangggagaaaaagaactctcagcctgaggcctacgt

SEQ ID NO: 12394 - DNA, 534 bp, Homo sapiens; identical to SEQ ID NO: 964

SEQ ID NO: 12395 - DNA, 508 bp, Homo sapiens
atctacacccaccatagtgatgtgtggtctttccgggtgctcctgtgggagatcttcactctgggcggctccccataccccggtgtgcctgtggaggaacttttcaagctgctgaatgagggtcaccgcatggacaagcccaggggctgcaccaactagctgtacatgatgatgcgggactgctggcatgcagtgccctcacagagacccaccttcaagcagctggtggaagacctggaccgcatcgtggccttgacctccaaccaggagtacctggacctgtccatgcccctggaccagtactcccccagctttcccgacacccggagctctacgtgctcctcaggggaggattccgtcttctctcatgagccgctgcccgaggagccctgcctgccccgacacccagcccagcttgccaatggcggactcaaacgccgctgactgccacccacacgccctccccagactccaccgtcagctgtaaccctcacccacagcccctgct

SEQ ID NO: 12396 - DNA, 444 bp, Homo sapiens
ggtccacagggtaagcttctctgccagtgggagccggctggcctgggtcaaccacgacagcaccgtgtctgttgctgatgcctcaaaaagtgtgcaggtctcgactctgaacacagagttcctagccgctcctaagtgtgtcattcgtctcagagaacagcgtcttggctgctgaccatgactgctgcccaatgctctttaactacgatgaccgcagctgcctgaccttcgtctccaagttagatattccaaaacagagcatccaacgcaacatgtctgccatggaacgcttccgcagcatggacaagagagccacaactgaggaccgcaacactgtcttggagacgctgcaccagaatagcatcactcaagtctctatttatgaggtggacaaacaagattgacgtagattttgcactactggcatcgatggagccatgataa

SEQ ID NO: 12397 - DNA, 282 bp, Homo sapiens
attctaagaaaatggacctgacagtaaatggggaacaactggatctggatcctggtcaaactttaatttattatgttgatgaaaaagcacctgaattctcaatgcagggtctaaaagctggtgttattgctgttattgtggttgtggtgatagcagttgttgctggaattgttgtgctggttatttccagaaagaagagaatggcaaagtatgagaaggctgagataaaggagatgggtgagatgcatagggaactcaatgcataactatataatttgaaga

SEQ ID NO: 12398 - DNA, 99 bp, Homo sapiens
gagccagcctgacattagacagaataccctttgttatacatagtacatttttactcatgccttattgtttaggataaataggtaagcacaaagagctct

SEQ ID NO: 12399 - DNA, 424 bp, Homo sapiens
gggagggttttcaggcagaggaacagttggccaaggaagtcagcttctcagagctcaagagtagatctgagtttaactcattaaagatggcatggaagagcagtgtcataatgcaaatgggaagatttcttctcttagtaattttatttctgccacgtgagatgacaagttctgttttaactgtgaatggtaaaactgagaactatatcctggatactacacctggctcccaagcatctctgatatgtgctgttcaaaaccacaccagagaggaagaactgctctggtaccgagaggaggggagagtggatttgaaatctggaaacaaaatcaattccagctctgtctgtgtctcttccatcagtgaaaatgacaacggaatcagctttacctgcaggctggggagggatcagtccgtgtccgt

SEQ ID NO: 12400 - DNA, 328 bp, Homo sapiens
gagaagacgacagaagggtaaaatgatcagctctttggggaatctggaatcctttaccctagtcccagatccccagcctctatgttttgtgatagtgccatagctgaggcagacctacagcagtgtagccagtagtttctctaggccttgtaagcccacggttctcaaaatgtggccccagaccaccagcatcagtatcacctggcacaggccaactacttgggagactggggcgggagaactgcccgagcctgggaggtcaaggttgcagtgagccatgatcatgccactgcactccagcctgagtgacagagtgagaccctatccc

SEQ ID NO: 12401 - DNA, 341 bp, Homo sapiens
ggtcgacgagcggtgacctcagccagtgtcacaaggagcagaagagacatccagctgagccctttaaaaattcctgacccacaagcaggactgaatcacttaacgttgtcttgcttgagtgctttgacccgccatctcctcctcctaccaactcttaattccgaggcaagagaagcctcccaagaggaggccactagtagcagagctgaaacaaaagcctcagaagcagtggggaagcattttacctgcagctctggaaaacgacctactgaagaaagtttcagatggggaaacatttagatttgacctaaatggggaaaaaaagtttataatagaaggac

SEQ ID NO: 12402 - DNA, 136 bp, Homo sapiens
ggctaagcggcggatgcagtacaaccggcgctttgtcaacgttgtgcccacctttggcaagaagaagggccccaatgccaactcttaagtcttttgtaattctggctttctctaataaaaaagccacttagttcag

SEQ ID NO: 12403 - DNA, 139 bp, Homo sapiens
ggactggagagaaacagtaggaaggaactttacttttcatcattgtataactcaagtgtttaccaaaaaaaggtaaatgactaggaaacttaatattatagattaaaaaaatataaacagccctagagtacagtacaag

SEQ ID NO: 12404 - DNA, 217 bp, Homo sapiens
gtggagaatgtgtatttactcactgtgaaaacagcaaagcctcattaactagaaactagccccgggagagggcttgatttgtttaaaaagtccccatgatgcccagagctgtgcaaacatttttaagtgggagaggaggaccactaacatttactgagaggtcactctgggccagccactgttctaactgctttacatgtattatttaactttagtt

SEQ ID NO: 12405 - DNA, 146 bp, Homo sapiens
agaagggcagtgtatggaggaatggtaagtactttacagctgttgtacagggcagcatgtcctgaaaggggctgcaagaaatgctgattccaagggatgtgtgccagttctctgggggaggaagaaaggctctgtagcagaaagac

SEQ ID NO: 12406 - DNA, 95 bp, Homo sapiens
gttttatctacgaagcttaataaaggtgtcgttccaattttctataaaacacttgcttccaatgaatcctcaattcggggtcaaatgctcccagt

SEQ ID NO: 12407 - DNA, 196 bp, Homo sapiens
cagaaggggcctttcctcagctgccgacaaggtgctcggtccttccgaggaagctaaggctgcgttggggtgaggccctcacttcatccggcgactaccaccgcgtgcgggggggccaaccctacactcccccgcgccatggcctctgtctccgagctcggctgcatctactcggccctcattctgcacgacgatg

SEQ ID NO: 12408 - DNA, 522 bp, Homo sapiens
gggtaaataaatacatatgcatagactgtaaaaccagcaaagtaagccttactcaaatgttggtataagataaaagtaaggctggacatggtggttcacacctataatttcaactttgggaggccaaagcagaacgatcacttgatgccaagagtttgagaccatcctgggcagcatagcaaaaccccatctctacaaaaaattcaaaaaatatctgggcgtggcggcatacacttgcattcctagctactcatgaggctgacatgagaggattgcttgagcccaggagtttgaggttacagtgagctatgatagcaccactgcaccccaacctgggcgacatagtaagatcctatctcaaaaattaaaatgaaatcttaaaaaagtaaaaaattattccattcttcatacatcaagataaatttcaaatgagtcaaagaagtgaatccatataaataatagaagaaaacatgagtggtcccttcatatcctggcaatgggaaaaatatttcctaaccatga

SEQ ID NO: 12409 - DNA, 69 bp, Homo sapiens
aaccgcattctgctgggaaccgcttctgctgggaaccgcttctgctgggaaccgcattctgctgggaac

SEQ ID NO: 12410 - DNA, 132 bp, Homo sapiens
aagggacccacaggaagttacagtggtgcccacggatgtgtcagcctccagccacggggacgcgggattcaagaatgaagttgatacaggctcagtcaagaccttaaataaaaatttgtacaaagaaaaaaa

SEQ ID NO: 12411 - DNA, 194 bp, Homo sapiens
tgtaagcacagagaggggaaaataattgttcactgttctggggtggaaagggactgaagatacaatcaagaaaaatgtgcacaaaactcatcaggaaacattggctaactgtattttctgataccgtggagttgtatttcccatgggaagtatttgaggatctactgagtcactgaagctggaactggccgcac

SEQ ID NO: 12412 - DNA, 378 bp, Homo sapiens
ggccttcggacgccggattttgacgtgctctcgcgagatttgggtctcttcctaagccggcgctcggcaagttctcccaggagaaagccatgttcagttcgagcgccaagatcgtgaagcccaatggcgagaagccggacgagttcgagtccggcatctcccaggctcttctggagctggagatgaactcggacctcaaggctcagctcagggagctgaatattacggcagctaaggaaattgaagttggtggtggtcggaaagctatcataatctttgttcccgttcctcaactgaaatctttccagaaaatccaagtccggctagtacgcgaattggagaaaaagttcagtgggaagcatgtcgtctttatcgctc

SEQ ID NO: 12413 - DNA, 429 bp, Homo sapiens
atataccaatgatggcgcgatgtaacacgagaaagcacataccaaggccaccacacaccacctgtccaaaaaggccttcgatacgggataatcctatttattacctcagaagtttttttcttcgcaggatttttctgagccttttaccactccagcctagcccctaccccccaattaggagggcactggcccccaacaggcatcaccccgctaaatcccctagaagtcccactcctaaacacatccgtattactcgcatcaggagtatcaatcacctgagctcaccatagtctaatagaaaacaaccgaaaccaaataattcaagcactgcttattacaattttactgggtctctattttaccctcctacaagcctcagagtacttcgagtctcccttcaccatttccgacggcatctacggctcaaca

SEQ ID NO: 12414 - DNA, 474 bp, Homo sapiens
ggggagcagcagcaggaggaggcagagcacagcatcgtcgggaccagactcgtctcaggccagttgcagccttctcagccaaacgccgaccaaggaaaactcactaccatgagaattgcagtgatttgcttttgcctcctaggcatcacctgtgccataccagttaaacaggctgattctggaagttctgaggaaaagcagctttacaacaaatacccagatgctgtggccacatggctaaaccctgacccatctcagaagcagaatctcctagccccacagaatgctgtgtcatctgaagaaaccaatgactttaaacaagagacccttccaagtaagtccaacgaaagccatgaccacatggatgatatggatgatgaagatgatgatgaccatgtggacagccaggactccattgactcgaacgactctgatgatgtagatgacactgatgattctcaccagtctgatgag

SEQ ID NO: 12415 - DNA, 332 bp, Homo sapiens
gagtttgtaccactgtagcaatagctattgttgcagaaacatgttcaccctttacagtactccctgccttaatgaatgaatacagagttcctgaactgaatgttcaaaatggagtgttaaaatcgctttccttcttgtttgaatatattggtgaaatgggaaaagactacatttatgccgtaacaccgttacttgaagatgctttaatggatagagaccttgtacacagacagacggctagtgcagtggtacagcacatgtcacttggggtttatggatttggttgtgaagattcgctgaatcacttgttgaactatgtatggcccaatgta

SEQ ID NO: 12416 - DNA, 428 bp, Homo sapiens
caggcagtctggaggaacttagacatgttctggagcagctcatcgttgctcacttccccatgcagtccagggaatttcctgcaggaactgcgcggttcaataattatgtggactgcatgaaaaagtttctagatgcattggaattatctcaaagccctatgttgttggaattgatgacagaagttctttgtcgggaacagcagcatgtcatggaagaattatttcaatccagtttcaggaggattgccagaaggggttcatgtgtcacacaagtaggccttctggaaagcatgtatgatatgttcaagaaggatgacccccgcctaagttgcacacgccagtcctttgtggaccgctccctcctcactctgctgtggcactgtagcctggatgctttgagagaattcttcagcacaattgtggtggat

SEQ ID NO: 12417 - DNA, 487 bp, Homo sapiens
agtaggagatggcacagttagctggggtctagaagatgacgaagacatgacacttacaagatggacaggggtgatcattgggcctccaagaacaatttatgaaaaccgaatatacagccttaaaatagaatgtggacctaaatacccagaggcaccctcctttgtaagatttgtaacaaaaattaatatgaatggagtaaatagttctaatggagtggtggacccatgagccatatcagtgctagcaaaatggcagaattcatatagcatcaaagttgtcctgcaagagcttcggcgcctaatgatgtctaaagaaaatatgaaactccctcagccgcccgaaggacagtgttacagcaattaatcaaaaagaaaaaaccacaggcccttccccttccccccaattcgatttaatcagtcttcattttccacagtagtaaattttctagatacgtcttgtagacctcaaagtaccggaaaggaagct

SEQ ID NO: 12418 - DNA, 414 bp, Homo sapiens; identical to SEQ ID NO: 3854

SEQ ID NO: 12419 - DNA, 443 bp, Homo sapiens; identical to SEQ ID NO: 3855

SEQ ID NO: 12420 - DNA, 346 bp, Homo sapiens; identical to SEQ ID NO: 3857

SEQ ID NO: 12421 - DNA, 426 bp, Homo sapiens
tcacaatgctttatattgttcagagaatatttgcattcattacatcaactgcaattcatagggattctgtgagctgatatgtcattacattacttctcaggtgaataatttagtggacttattaaaaattagaaaaaattagaaaccaggcatggtggctcatgcctgtcatcccagcactttgggaggctgacgcgggtggttcacctgaggtcaggagttcgagactagcctggccaacatgatgaaaccccatctatactaaaaatacaaaaattagctgggtgtgatggcatgcccctgtaatcccagctactgcggaggctgacgcatgagaatggcttgaaccacggaggcggaggtggcactgagcggagatcgtgccattgcattccagcctggacaacaaaagcagaactccctctc

SEQ ID NO: 12422 - DNA, 418 bp, Homo sapiens
gagcactctgacctagcagtcaacatgaaggctctcattgttctggggcttgtcctcctttctgttacggtccagggcaaggtctttgaaaggtgtgagttggccagaactctgaaaagattgggaatggatggctacaggggaatcagcctagcaaactggatgtgtttggccaaatgggagagtggttacaacacacgagctacaaactacaatgctggagacagaagcactgattatgggatatttcagatcaatagccgctactggtgtaatgatggcaaaaccccaggagcagttaatgcctgtcatttatcctgcagtgctttgctgcaagataacatcgctgatgctgtagcttgtgcaaagagggttgtccgtgatccacaaggcattagagcatgggtggcatggagaa

SEQ ID NO: 12423 - DNA, 251 bp, Homo sapiens
  misc_feature 251: n = A,T,C or G
ggcgcaatctcggctcactgcaagctctgcctcccgggttcacgccattcttctgcctcagcctcctgagtagttgggactacaggcgcccgccaccacgcccagctaatttttttgtatttttagtagagacggggtttcactgtgttagccaggaactgaccgcaaacgaggccgccagacctacacccgctaccagaccctggagctggagaaagaatttcactacaatcgctacctgacgcggcggn

SEQ ID NO: 12424 - DNA, 390 bp, Homo sapiens; identical to SEQ ID NO: 2908

SEQ ID NO: 12425 - DNA, 353 bp, Homo sapiens
caacctctgactccctggttcaaacgattctcctgcctcagcctcccgagtggctggcatcaccacgcccagctgatttttgtatttttagtagagacggggtttcaccatgttgcccaggatggtctcgatctcctcacctcgtgatccgcccgcctcggcctcccaaagtgctgggattacaggcatgagccaccgcgcccggccccaatcatctgtttttaaacaatcgtttttgagcagatagctattcattccagattttcgtgtacccattctgtttcaggagctcttctaggtaaagctgagatcacaggaacagcaggtgacaggcctagctatagttaggaata

SEQ ID NO: 12426 - DNA, 468 bp, Homo sapiens
ataaagaacgagaacgccaaagggattgggaagacaaagacaaaggacgagatgaccgcagagaaaagcgagaagagatccgagaagataggaatccaagagatggacatgatgaaagaaaatcaaagaagcgctatagaaatgaagggagtcccagccctagacagtccccgaagcgccggcgtgaacattctccggacagtgatgcctacaacagtggagatgataaaaatgaaaaacacagactcttgagccaagttgtacgacctcaagaatctcgttctcttagtccctcgcacctcacagaagacagacagggtagatggaaagaggaggatcgtaaaccagaaaggaaagagagttcaaggcgctacgaagaacaggaactcaaggagaaagtttcttctgtagataaacagagagaacagacagaaatcctggaaagctcaagaatgcgtgcacaggaca

SEQ ID NO: 12427 - DNA, 422 bp, Homo sapiens; identical to SEQ ID NO: 3875

SEQ ID NO: 12428 - DNA, 57 bp, Homo sapiens; identical to SEQ ID NO: 3876

SEQ ID NO: 12429 - DNA, 339 bp, Homo sapiens
tatttaaattattgttaaagaatacacaatttggggtattgggatttttctccttttctctgagacattccaccattttaatttttgtaactgcttatttatgtgaaaagggttatttttacttagcttagctatgtcagccaatccgattgccttaggtgaaagaaaccaccgaaatccctcaggtcccttggtcaggagcctctcaagattttttttgtcagaggctccaaatagaaaataagaaaaggttttcttcattcatggctagagctagatttaactcagtttccaggcacctcagaccaatcatcaactaccattctattccatgtttgc

SEQ ID NO: 12430 - DNA, 437 bp, Homo sapiens
gatcaatgaaggcaggccacttccggcgtagccatggcggctaacgctactaccaacccgtcgcagctgctgccgttagagcttgtggacaaatgtataggatcaagaattcacatcgtgatgaagagtgataaggaaattgttggtactcttctaggatttgatgactttgtcaatacggtactggaagatgtcactgagtttgaaatcacaccagaaggaagaaggattactaaattagatcagattttgctaaatggaaataatataacaatgctggttcctggaggagaaggacctgaagtgtgaatgagtttccttgacttacactagattttgttttggcttataatgacaagaaaatggaattttttttcccactttctaatgtttaaatcccataaagctaagtttcccgttaaagggaagtgctttga

SEQ ID NO: 12431 - DNA, 292 bp, Homo sapiens; identical to SEQ ID NO: 3884

SEQ ID NO: 12432 - DNA, 426 bp, Homo sapiens; identical to SEQ ID NO: 3889

SEQ ID NO: 12433 - DNA, 587 bp, Homo sapiens
ttgcttttcctttactgtgaagataatataatccctgcagtgtttctctgctaacatatgcaatttgcagttctgacagaggtccagttacgtgataaatatcctgtaaagaaccacctccacaaaactccatgcaaatccaaagcttatctcgcctgagatagcttccaaaataagcaacaatatttgggtgtttacagtctttcatcataataatttcttgctgcacaactgcaaagtcttctcctggttccaattttattactttaattgctgctaattcaccagtgttaacattccgtgccttgtagacgtcgccgtaggtgccgctgccgatgcgctgaatcagctcgaagtcctcctgcgggttccggcgggacaaatcgaagccggggttcatggcgggccccaggtgccccccgcctccctcccgggcaggggaggggggccgctcagggggccacacggagagagggcgccgcggccggctcccggctcccccggcggtcacaatcacccggctccacgctgcggccgcaagcttattccctttagtgagggttaattttagcttggcactggccgtc

SEQ ID NO: 12434 - DNA, 213 bp, Homo sapiens
gacgaccgaaggggcatctctactaaaaatacaaaaattatccgggtgtggtggcaggtggctgtaatcccagctactcacgaggccgaggcatgataatcacttgaacctgggagtcagaagttgcagtgagccaagatcgcaccactgcactccagcctggatatatggcaagactctgtctcaagatttatatatatgaaataaaaatac

SEQ ID NO: 12435 - DNA, 226 bp, Homo sapiens; identical to SEQ ID NO: 3896

SEQ ID NO: 12436 - DNA, 331 bp, Homo sapiens
gtacagtggctcacacctgcaatcccagcactttgggaggccgaggtgggcggatcacgacgtcaagagatcgagaccatgctggccaacatggtaaaaccccgtctctactgaaaatttgaaaattagctgggtgtggtggcacacgcctgtagtcccagctactccggaggctgaggcatgataatcgcttgatcccgggacacagaggttgtggtgagccgaaatggctccactgcactacaacatggtgacagagtgagactcagtcccctgaaaaaaaaataagtcccaaaaaaggggcggcctttttttaaaaaacccccccctt

SEQ ID NO: 12437 - DNA, 409 bp, Homo sapiens
ggagtgctgtacaaagagacagaggctgttagctatggctgaaggcaaccacaaaaaaaaacagttaagatgttggaatacctgggcaaagatgttcttcatggtgtttttaattatttggcaaaacacgatgttctgacattgaaggaagaggaaaagaaaaaatattatgataccaaaattgaagacaaggccctgatcttggtagactctttgcgaaagaatcgcgtggctcatcaaatgtttacccaaacacttctcaatatggaccaaaagatcaccagtgtaaaacctcttctgcaaatcgaggctggaccacctgagtcagcataatctacaaatatactcaaactttgtcctcgtgaagaattcctgagactgtgtaaaaaaaatcatgatgagatctatc

SEQ ID NO: 12438 - DNA, 495 bp, Homo sapiens
catgtatcgggaattctgggcaaaacctaagccttagaagaagagatgctgtcttggtcttgttggaggagcttgctttagttagatgtcttattattaaagttacctattattgttggaaataaactaatttgtatgggtttagatggtaacatggcattttgaatattggcttcctttcttgcaggcttgatttgcttggtgaccgaattactagtgactagtttactaactaggtcattcaaggaagtcaagttaacttaaacatgtcacctaaatgcacttgatggtgttgaaatgtccaccttcttaaatttttaagatgaacttagttctaaagaagataacaggccaatcctgaaggtactccctgtttgctgcagaatgtcagatattttggatgttgcataagagtcctatttgccccagttaattcaacttttgtctgcctgttttgtggactggctggctctgttagaactctgtccaaaaagt

SEQ ID NO: 12439 - DNA, 403 bp, Homo sapiens
  misc_feature 281: n = A,T,C or G
gagaagacgacagaaggggaagaaatatgaagaaagttgctaattcttgtgtctttcagtcactccctccaaaatatggagatgctcacaagctataagaaacagtagaaaatgaagcaaaatgttacccgcagtcacttctggagtcacaatataactagaggtaagagcatattcattcatctggagctataacatattgtttaaagtgggggcatgagaatcagcttgcctatgtttacatctcagcggtgacacacatgacaatcacagcttagctntggaaccttgggcaaattattttacctaaatctcaagactcctcttttgtaaaatgggaagttaaaaacatctacctctagcctggaacatagtgagaccctgtctctacagaaaataaatt

SEQ ID NO: 12440 - DNA, 397 bp, Homo sapiens
gaagggtgaaaggcaaggaaggaaggaaggaaggaaggaaggaaggaagttagttgattaaaatttaattaacttaggccaggtgtggtggctcacgcctgtaatcccagcactttgggaggctgaggcaggcagatcacgaggtcaagagattgggaccagcctgaccaacagagtgaaaccctgtctctactaaaaatacaaaaattagctgggcgtagtggcgcacacctgtagtcccagctactcaggaggctgaggcagaagaatcgcttgaacgtgggaggcagagccacggtgcctggccttgtcataaatctttaataagaaaaataacctaattttaaaatgagctcaaggccaagagcagtggctcacgcctataaccccagcactt

SEQ ID NO: 12441 - DNA, 488 bp, Homo sapiens
aattgacaggatttagattttgcttagtttttctgctttttaatgtttctatcccccatctcagtgttttctttatccatcccagtgatgccttatttgaaactgggcttaaactgcaaaaagaatgaagttggatttaggaagctgttagatcattgagtggtgttgagagtgaagtttcactagcagggaagtttccttgagcctaaaataaaaagaaaaaattaaaaagaatcagttttcttaattaaaaaaatagaaagctgttaggctcctaattcgtggggttttttttgtaaaaacagtttagataatcctgaatgcaatcattaacttggttgctaattacaagaatgaaaattataatggaaaaggacaaaataatataccagctggtttgttattatagtccgggtattaaaatactattgaaatacgttaaaggtaaatttttaaggtttaaaaaaaatttagtaacttacagggat

SEQ ID NO: 12442 - DNA, 366 bp, Homo sapiens
cgtcttaaaaaaaaaaatggttataaaaaggccaaacacggtggctcatgcctgtaatcccagcactttgggaggccaaggcgggtggatcacccaagggcagaagttcaaaaccatccagcctgatcaacatggtgaaaccccttttttactaaaaatacaaaaattacccaggcatgggggggcatgcctgtaatctcagctacttgggaggctgaggcaggaaaatcccttgaacctgggaggtgcaggttgctgtgagccaaaataacaccactgcaccctaacctgggcaacaaaagtgaaactccgccttaaaaaaaaaatggtttttaaaaaacaaataaaggaaatcgtttttttttt

SEQ ID NO: 12443 - DNA, 336 bp, Homo sapiens
gattcttcccctctctacaaccctctctcctcagcgcttcttctttcttggtttggtgcttctgagatgtgggcttgcacacgctgttgctatagtacgtgttgatcctgactgctgtcatggcgtgccctctggagaaggccctggatgtgatggtgtccaccttccacaagtactcgggcaaagagggtgacaagttcaagctcaacaagtcagaactaaaggagctgctgacccgggaactgcccagcttcttggggaaaaggacagatgaagctgctttccagaagctgatgagcaacttggacagcaacagggacaacgaggtggacttcc

SEQ ID NO: 12444 - DNA, 400 bp, Homo sapiens
aaggggggagggataaagatttctaagcaaataattgcaatgccttttattcatttattaatagtcaattcactcactcattaattcattctgaaaacatgtggcatttgggctgggcacagtggctcacgcctgtaatcccagcactttgggaggccgaggagggcagatcacttagaggtcaggagttctagaccagcctggtcaacatggcaaaaccccatctctactaaaaatacaaaaaaaatttagccgggcctggtggcaggcacctgtaatcccagctactcgggaggctgaggcaggagaatcgcttgaaccccggaagtggaggttgcagtgagccaggattccactgcactccagcctgggggacagaacgaaactctgcctcaaaaag

SEQ ID NO: 12445 - DNA, 383 bp, Homo sapiens
tataaaacactctgaaatatttctgtccaaagtggtttaaatattacttataataactagtaaaagtttaaaaagtggtctaaagctgggcgcggtggctcacgcctgtaatcccagctctttgggaggccgaggcgggcggatcacaacgtcaggagattgagaccatgttggctaacacggagaaaccccgtctctactaaaaatacaaaaaattaaccgggcgtcgtggctggtgcctgtagtcccagctactcacgaggttgaggcatgataatggcgtgaacctgggaggcggagcttgcactgagccgagattgtgccactgcaatccggcctgggctaaagagcgggactccgtctccaaaaaaaagacttcgact

SEQ ID NO: 12446 - DNA, 499 bp, Homo sapiens; identical to SEQ ID NO: 3907

SEQ ID NO: 12447 - DNA, 454 bp, Homo sapiens
cctctgcctcccgggttcaagcaattctctgcctcagcctcccaagtagttgggattacaggcacctgccaccatgcctggctaattttttgtatttttagtagagacgggggtttcactatgttggctaggctggtcttgaactcctgacctcgtgatccacccgccttggcctcccaaagtgctgggattacaggcatgagccaccgcacctggccttccctgcttcctctctagaatccaattagggatgtttgttactactcatattgattaaaacagttaacaaacttttttctttttaaaatgtgagatcagtgaactctggttttaagataatctgaaacaaggtccttgggagtaataaaattggtcacattctgtaaagcacattctgtttaggaatcaacttatctcaaattgtaactcggggcctaactatatgagatggctg

SEQ ID NO: 12448 - DNA, 337 bp, Homo sapiens
ggctgtgagtgtctctagggtgatacgtgggtgagaaaggtcctggtccgcgccagagcccagcgcgcctcgtcgccatgcctcggaaaattgaggaaatcaaggacttcctgctcacagcccgacgaaaggatgccaaatctgtcaagatcaagaaaaataaggacaacgtgaagtttaaagttcgatgcagcagatacctttacaccctggtcatcactgacaaagagaaggcagagaaactgaagcagtccctgccccccggtttggcagtgaagtaactgaaatgaaccagacacactgattggaactgtattatattaaaatactaaaaatc

SEQ ID NO: 12449 - DNA, 410 bp, Homo sapiens; identical to SEQ ID NO: 3912

SEQ ID NO: 12450 - DNA, 549 bp, Homo sapiens
ctctccgccccgcgtccagctcgcccagctcgcccagcgtccgccgcgcctcggccaaggcttcaacggaccacaccaaaatgccatctcaaatggaacacgccatggaaaccatgatgtttacatttcacaaattcgctggggataaaggctacttaacaaaggaggacctgagagtactcatggaaaaggagttccctggatttttggaaaatcaaaaagaccctctggctgtggacaaaataatgaaggacctggaccagtgtagagatggcaaagtgggcttccagagcttcttttccctaattgcgggcctcaccattgcatgcaatgactattttgtagtacacatgaagcagaagggaaagaagtaggcagaaatgagcagttcgctcctccctgataagagttgtcccaaagggtcgcttaaggaatctgccccacagcttcccccatagaaggatttcatgagcagatcaggacacttagcaaatgtaaaaataaaatctaactctcatttgacaagcagagaaagaaaagttaaatacc

SEQ ID NO: 12451 - DNA, 335 bp, Homo sapiens; identical to SEQ ID NO: 3913

SEQ ID NO: 12452 - DNA, 464 bp, Homo sapiens
cccaaagtgctgggattacaggcttgagcccccgcgcccagccatcaaaatgctttttatttctgcatatgttgaatactttttacaatgtaaaaaaatgatctgttttgaaggcaaaattgcaaatcttgaaattaagaaggcaaaaatgtaaaggagtcaaaactataaatcaagtatttgggaagtgaagactggaagctaatttgcattaaattcacaaacttttatactctttctgtatatacattctttttctttaaaaaacaactatggatcagaatagccacatttagaacactttttgttatcagtcaatatttttagatagttagaacctggtcctaagcctaaaagtgggcttgattctgcagaaaatcttttacaactgcctcgacacacataaacctttttaaaaatagacactccccgaagtcttttgttcgcatggtcacacactgatg

SEQ ID NO: 12453 - DNA, 532 bp, Homo sapiens
cagaaggggagagtgtggtcaggcggctcggactgagcaggactttccttatcccagttgattgtgcagaatacactgcctgtcgcttgtcttctattcaccatggcttcttctgatatccagttgaaagaactggagaagcgtgcctcaggccaggcttttgagctgattctcagccctcggtcaaaagaatctgttccagaattccccctttcccctccaaagaagaaggatctttccctggaggaaattcagaagaaattagaagctgcagaagaaagacgcaagtcccatgaagctgaggtcttgaagcagctggctgagaaacgagagcacgagaaagaagtgcttcagaaggcaatagaagagaacaacaacttcagtaaaatggcagaagagaaactgacccacaaaatggaagctaataaagagaaccgagaggcacaaatggctgccaaactggaacgtttgcgagagaaggataagcacattgaagaagtgcggaagaacaaagaatccaaagaccctgctg

SEQ ID NO: 12454 - DNA, 720 bp, Homo sapiens
agcatccacaaagtatattatttccatgagttttctattatgtggagattttccttaagaagtaaaatgaagtttgaatagtacagtctgtggggtggtgacatcagcaaccgccagttcttgtccatcaacaagccccaattctttcaatgttttggagagatttggccttgttcgttcttcaatagaggttaccgactgtaagtaaagggttctattttttccctctagggtggctgtgatggctggagatttcatttgcagagaagcactattggttagataatccaaaacctcctgtagtttagctgatggagaaaactgaatattttgaggaagctggctacaagctgggcaggtttcctttctttctgcttcaaatgtgtatgtatacagcccatctacatcattaaacaccaagtaattattcaagggaatgtatgcacttgtggctattttaaaaacctcagtggcacacacagctgcaatgactgcatttgtggaagctactgcaggaatgattctttttactaccccttgagtgagcctatacgtaacacccctaatattatattgggatgctctctctagggatttttggaaaatccattgtatatgttcaggatcatctccatctaatggaaccccttctccaaaaggctgctccttaggccactggaacatccttacatactaaatacagtgttctggtagccctgg

SEQ ID NO: 12455 - DNA, 476 bp, Homo sapiens
  misc_feature 455: n = A,T,C or G
attccattgtatagatacaacttagtttttcttcttatgaatgaggtggaggattttttcataccgaaagcccttatttttctgtggactgtcagatcatgtcctttgcctatttatgtgttgcactgttggcacttttcttaactcaaacctacaataaatgtgtaggttcactggaaaagaatcaggtctgagaggaaagactttgagcttgtcttgggcacaattatgtttgaagcgcttttgagtcatcttaagaggtaatgtgggccaggcatggtggctcacgcctgtaattccaacattctgggaggctgaggcagtaggatcacttgaggtgaggagttcgagaccagcctgagcaacacaataagaccagtctctacaaaaaattttaaaaattagccagcggtggtgggttgtgcttgtagtctcagcttcttgagagactgagnacggaggatggtttgaaccca

SEQ ID NO: 12456 - DNA, 500 bp, Homo sapiens
catgaaaatttttcttatttttgaaatttcaaagtccaattttataacacaattttacaatgcaaattcttgctgtttcactttctggattcagctgaatagttttgtgaaaatactgacaaacttgccttcacgaactgacttccaagaacaaattgttaaaactttaacagaaaaatcagttaaaggtgctcatcaagagaatccttttcatttggtataaatccaaaactatgaaaataccttttgtattatgtgcatgcagaaaattaagaatttattcaatttgcagaaataaatcagtgatataatggaaacatttaaaattttatctctggaaaataattcaaaatcatctatcaaaaattataggccgggcacagtggctcacgcctctaatcccagcactttgggaggccgaggtggatggatcacctgaggtcaggagttcgagaccagcctgaccaacatggagaaaccccatctctactaaaaataca

SEQ ID NO: 12457 - DNA, 319 bp, Homo sapiens
cacgcctgtaatcccagcactttgggaggccaaggcaggcggatcacctgaggttgggagttcgagaccagcctgaccaaaatgatgaaaccctgtctctactgaaaatacaaaaatcagccaggggtggtggcacatgcctgtaattccagctacttgggaggctgagacaggagaatcgcttgaaccccggaggcggaggttgtggtgagccgagatcgcaccattgcactccagcctgggcaacaagagcgaaactccgtctaaaaaaaaaaagaaaagtagttggaccctgtttttacaaaaagcacaaaaatgg

SEQ ID NO: 12458 - DNA, 438 bp, Homo sapiens
gctgcgatcatgccacggcactctagcctgcatgatagagcgagatcctgtttatgaagaaaaagagactgggcacggtggctcacgcctgtaatcccagcactctgggaggccgaggtgggcggatcacgaggtcaagagatcgagaccatcctggccaacgtggagaaaccctgtctctactgaaaatagaaaaattagctgggtatggtcgcgcacacctgtagtcccagctacttgggaggctgaggcatgagaatcacttgaacccaggagacggaggttgcagtgagctgagatggtgccactgcactccatccagcctggtgacagagcgaggctccctctaaaagaaaaacaatacatgaaaaggaaatgaaggaaatgaaggctgggcatggtagctcatgcctgtaatcccagcactttgggaggccg

SEQ ID NO: 12459 - DNA, 532 bp, Homo sapiens
acagaagggcggctcgctgcaacctctgactccctggttcaaacgattctcctgcctcagcctcccgagtggctggcatcaccacgcccagctgatttttgtatttttagtagagacggggtttcaccatgttgcccaggatggtctcgatctcctcacctcgtgatccgcccgcctcggcctcccaaagtgctgggattacaggcatgagccaccgcgcccggccccaatcatctgtttttaaacaatcgtttttgagcagatagctattcattccagattttcgtgtacccattctgtttcaggagctcttctaggtaaagctgagatcacaggaacagcaggtgacaggcctagctatagttaggaatacacaagccgtaaaatcgagtccttacagccataccacaaggtacgtccatttggactacaagaagagcttcctttaaagttcctatttcagcataaagaggctgtccttttttttgaggaatagtttggaccttgtgcctcctgtgggaggctgaggact

SEQ ID NO: 12460 - DNA, 448 bp, Homo sapiens; identical to SEQ ID NO: 3931

SEQ ID NO: 12461 - DNA, 360 bp, Homo sapiens
gctcttctgaggatccggcaagatggcagaagtagagcagaagaagaagcggaccttccgcaagttcacctaccgcggcgtggacctcgaccagctgctggacatgtcctacgagcagctgatgcagctgtacagtgcgcgccagcggcggcggctgaaccggggcctgcggcggaagcagcactccctgctgaagcgcctgcgcaaggccaagaaggaggcgccgcccatggagaagccggaagtggtgaagacgcacctgcgcgacatgatcatcctacccgagatggggggcagcatggcgggcggctactaccgcgagaactttaaccaggtggagtatacgcccgagatgatcgg

SEQ ID NO: 12462 - DNA, 288 bp, Homo sapiens
acaatttcatggcaatttatttaaaaaaggtagagaccatgttttttcttttctttaaatctctgtaccctaccgcttggctcaacattaggctctggatataataaagatttgttgaatgaacaagtacacaagtgaaaaatgcttaaaaacatgttctgctcaattggggtcagattgctgtccaaactcctccagtagaggacaatcgcctcctccttatgggaagatctatataatcacagaacagctggactcaaagaggagcctcagctaaggctaatggtt

SEQ ID NO: 12463 - DNA, 366 bp, Homo sapiens
aaggagatctagaggggcacagatccagataaaggtcgcttcatctctctaccccagttgccaccctctgctgtccccgcagagtttgcttggactataaagctgacaggagtgaagtaatcatttgagtgcaagaagaaagaggcgctgctcactgttttcctgcttcagtttttctcttatagtaccatcactataatcaacgaacttctcttctccacccagagatggcttttccaacacattttaattaaaggaactgagtacattaccctgatgtctaaatggaccaaagatctgagatccattgtgagtatatctgtatcaggtcagcaaaagaaggaactgagcaggtgaactctgatg

SEQ ID NO: 12464 - DNA, 432 bp, Homo sapiens; identical to SEQ ID NO: 3947

SEQ ID NO: 12465 - DNA, 229 bp, Homo sapiens
acgacagaagggtacggctgcgagaagacgacagaaggggcccagggaatcaagaaccatagataacggccgggcgcagtggctcacgcctgtaatcccagcactttgggaggccaaggcgggcggatcacctgaggtcaggagtttgagaccagcctgaccaacatggtgaaatccaatctctactaaaaatacaaaaaattatccgggcattgtggtgcgtgcctgg

SEQ ID NO: 12466 - DNA, 63 bp, Homo sapiens
aggaggatgaggataacagtgaaaaaattaaagagcgttcaagaataaattcttctggtgaaa

SEQ ID NO: 12467 - DNA, 67 bp, Homo sapiens
ttacattttcagaggggggggtcttaaacacattccacaaatgccattaaaaatttattttgtttta

SEQ ID NO: 12468 - DNA, 252 bp, Homo sapiens
ggtgcggcgacatgaaactgcttacccacaatctgctgagctcgcatgtgcggggggtggggtcccgtggcttccccctgcgcctccaggccaccgaggtccgtatctgccctgtggaattcaaccccaacttcgtggcgcgtatgatacctaaagtggagtggccggcgttcctggaggcgtccgataacttgcgtctgatccaagtgcccaaagggccggttgagggatatgaggagaatgaggagtttc

SEQ ID NO: 12469 - DNA, 405 bp, Homo sapiens
gagttgcagtcgtgttctccgagttcctgtctctctgccaacgccgcccggatggcttcccaaaaccgcgacccagccgccactagcgtcgccgccgcccgtaaaggagctgagccgagcgggggcgccgcccggggtccggtgggcaaaaggctacagcaggagctgatgaccctcatgatgtctggcgataaagggatttctgccttccctgaatcagacaaccttttcaaatgggtagggaccatccatggagcagctggaacagtatatgaagacctgaggtataagctctcgctagagttccccagtggctacccttacaatgcgcccacagtgaagttcctcacgccctgctatcaccccaacgtggacacccagggtaacatatgcctggacatcctg

SEQ ID NO: 12470 - DNA, 391 bp, Homo sapiens
tgagcaggcagcttacaagttgcctgctcaaaaaaactggaagccaagtacaagaagctggagaagcgatgagaaacttatttctatgggacagagtcttttttttttaatgtggaaaaatgtcttataaaacctgaatcctgaggctgatgaattgtgaaaattcctcaaaaggaaattatgctggtcatcacaggaacatctcaacgttcgagtaaactggaggactgtggctattcctgaaccttctttgaaacaaaatccctcaaaatctcacacttataacttcctaccttttacttgaatgctttgccatattcaggacagagactctcacaaagttcaaaaaacagctggacttaccagtaaaatcaaatgagaggacctattt

SEQ ID NO: 12471 - DNA, 480 bp, Homo sapiens
cactcaagtctgttaatggacaaatagaaagcctcattagtcctgatggttctcgtaaaaaccccgctagaaactgcagagacctgaaattctgccatcctgaactcaagagtggagaatactgggttgaccctaaccaaggattcaaattggatgctatcaaggtattctgtaatatggaaactggggaaacatgcataagtgccaatcctttgaatgttccacggaaacactggtggacagattctagtgctgagaagaaacacgtttggtttggagagtccatggatggtggttttcagtttagctacggcaatcctgaacttcctgaagatgtccttgatgtgcagctggcattccttcgacttctctccagccgagcttcccagaacatcacatatcactgcaaaaatagcattgcatacatggatcaggccagtggaaatgtaaagaaggccctgaagctgatggggtcaaatg

SEQ ID NO: 12472 - DNA, 357 bp, Homo sapiens; identical to SEQ ID NO: 3972

SEQ ID NO: 12473 - DNA, 383 bp, Homo sapiens
  misc_feature 383: n = A,T,C or G
gcagagcgagaacagtgcggaggtcgcccagctccggcgctgacgggtgtggaccgcggatgtcgctgggacagcccctccccgctgctcggcggcggcacctggcccggccgctcctcgctgcgcttcgcctccgcctcctcggactcggactcggactcgggtttatatcgcgcctcacttcatcccagtcccgggcgagcagcgttgggtttatgtctttatttgacgaaaacgagctgttgcgcagccattggtacctgtattggggaaacatagcatacaagcaagaagcttacagcctcagtggcgaaaattttttcatgtcagagaccgagaactcttgcagtcgtttatgtcatcccttcttctccagacagaan

SEQ ID NO: 12474 - DNA, 344 bp, Homo sapiens
  misc_feature 344: n = A,T,C or G
gggatgacaagtttgttcatcttaaggcaacagaagaaaatataaaaaacttcataaactgctttgtaatgaaaaactaaaataaaaaagaacaaacttggaaaaggtacgacaaatattacaaagggttacatattgccaggcacaatggcactaaaataaaaaaagaaaaaacttggaaaaaatactcatgacaaatatcacaaagagttacatattgccaagtgcagtggcacacacctggactcccagctacacaggcggctgaggtgggagtatcactttgagcctaggagttcgagaccaaaccagacaacttacttaggaagacctagtttctaaan

SEQ ID NO: 12475 - DNA, 430 bp, Homo sapiens
cagcccaggcaacagagcaagactctgtttcaaaaaagaaagtttattattctgaaacagtcaaattctttgcatataaaaatgtacaataattttatatttgcacatattgcagttgcttctatgcttccttttaaatgggaacgcctggccgggcgcggtggctcacgcctgtaatcccagcactttgggaggccgaggcgggcggatcacgaggtcaggagatcgagaccatcctggctaaaacggtgaaaccccgtctctactaaaaatacaaaaaattagccgggcgtagtggcgggcgcctgtagtcccagctacttgggaggctgaggcaggagaatggcgtgaacccgggaggcggagcttgcagtgagccgagatcccgccactgcactccagcctgggcgacagagcgagactccgtccc

SEQ ID NO: 12476 - DNA, 595 bp, Homo sapiens
gagtgagtttttccgtgctgtgtaggggctaacaatggacacccagaaggacgttcaacctccaaagcagcaaccaatgatatatatctgtggagagtgtcacacagaaaatgaaataaaatctagggatccaatcagatgcagagaatgtggatacagaataatgtacaagaaaaggactaaaagattggtcgtttttgatgctcgatgaatgctgggaattcagaggaatgtcttcacttatacttggatttgctctcttcccatttctgattgttgtatagctttcgattttgcttacagtagttcccccttatcttcgggagatacattccaaggcccccagtgaactcctgaaacctcaaacagtaccaaacctttatacactgttttttccatatatatatacctatgataaagtataatgtataaattaagcatagcaagagattaataataatgtaatagaacaatgataacatactataataaaagttatgtgaatgtggttggtctctcttgctttcaaaatatcttcttgtacagtactcacctattttagaatgtggttgactacaggtaaccaaaaccacag

SEQ ID NO: 12477 - DNA, 885 bp, Homo sapiens
gaatattgtggacatcatggacttgatatgatagaaatcaattgtcagcttgagaaagttgtttttaatctgtctaaatagttcatgcattactacagttaaaaatagtttcatttgtcttctatagacttaattttattccggttcagtataatctctgttaacagagtttcagcaaactgattggtcaaggtattaacatagcttctacttcctttacttaaaaagatgtggttttatgtaagttcttgattactgatgatcatcccaaattttgacaacaaaatcatatgtataaatttatttctcccctcttgttcatcatcttttgtaaaggtcccattgtagatcttttctgctaccaaataaaacttttcaaacaatttggtttcaagaccttaaatagacaagttggatactaagattgtgaactgataaggacatataaatttatatttccagcccttccttagagtctttatctgcatcaaaaacccaattctgccattaactgtgcttcgcagtcgcacatctatatgtcactcattttctgcaacaagatgcactaaatcatgtgaacgacagcatgatctctctaagtaatagaaaagtcctggaaactctgtgcacatgacgtgcatgtaccctcagcagcagtgtgcagcattatgtgaaagcccatataggctgctgacattcttcgaatagtttagaaaggctgggatgccgtatatggcggtgtatcttgaagtcaaagccgagctttataacactggtgcgtgcccccgctgctcctatcgtgggggggcgattattgcggcaacagggtgcttgccccacatggtgatgcctcttaggagtatcggcgatcaacagggaatcgta

SEQ ID NO: 12478 - DNA, 183 bp, Homo sapiens
tgagcctctttgatctcttccggggctttttcgggtttcctggacctcggagccacagagatcccttttttggagggatgactctgcttgaagatgatgatgaggaacacgatcaagaagggggctcatggggccgcgggaacccaaggttccataaccctcaccacccccctgaggaatttg

SEQ ID NO: 12479 - DNA, 258 bp, Homo sapiens
  misc_feature 204: n = A,T,C or G
tgctcctcagcacatagtagatgctttaaagtcagaggacttggtcgggcgcagtggctcacgcctgtaatcctagcactttgggaggctgaggagggcagatcacctgtggtcaggagttcgagaccagcctgatcaatatggtgaaaccctgtctctactaaaatacaaaaattatccaggtgtggtggtgggtgcctgtantcccagctacttgggaggctaagacaggagaatcgcttgaacccgggaggtgga

SEQ ID NO: 12480 - DNA, 409 bp, Homo sapiens
gttatgctatatggcaagggagaattacagttgcagatggaattaatgttgctaatcagttgaccataaaatagggagaccataatatggtcaataggagtttaccataaagctaggttttgtagttgggagggagggtgtagtgtattcagaaatatcctggccgggcacggtggctcacacctgtaatctcagcactttgggaggccaaggcaggcagatcatgaggtcaagagttagagaccagcctgaccaacacggtaaaaccccatctctactaaaaatacataagttagccaggtgtggtggtgcacgcctgtaatcccagctactcaggagactgaggcagtagaatcacttgaatccaggaggcggaggttacagtgagctgagattgcatcactgcact

SEQ ID NO: 12481 - DNA, 505 bp, Homo sapiens
gggcagattttcatgcaaaagttctcatatgagttagaggagaaaaagcttaatgattctgatatgtatccatcaggatccagtctggaaaacagaaaccattctaggtgtttcaacagagggagtttaatacaggaaattgacttacatagatgataaaagagaagccaaacagcaagaagctgttaccacacccagggctatgaggataatgggaagaggtttggtttcctgtgtccagtagtgggatcatccagaggagctggaaccatggtgggggctgcctagtgggagttagggccaccaatggattgtggaaaatggagccatgacaagaacaaagccactgactgagatggagtgagctgagacagataagagaataccttggtctcacctatcctgccctcacatcttccaccagcaccttactgcccaggcctatctggaagccacctcaccaaggaccttggaagagcaagggacagtgaggcaggagaagaac

SEQ ID NO: 12482 - DNA, 424 bp, Homo sapiens; identical to SEQ ID NO: 3988

SEQ ID NO: 12483 - DNA, 447 bp, Homo sapiens
gcctttgagagaggtttccgctgtaggagcagagcttccgggctgcgctcttcgttgcccagtttccgctcagtggtcgcgtctccgccccccacccaccagtcccgctgcattctcggccgggctctaggcgccatggctccccgtgggaggaagcgttaggctgaggccgcggtggtcgccgtagccgagaagcgagagaagctggcgaacggcggggagggaatggaggaggcgaccgttgttatcgagcattgcactagctgacgcgtctatgggcgcatcgccgcggtcctgagccaggcgctgcgcctggaggccccagatcttccagtaaaggtgaacccgaccaagccccggaggggcagcttcgaggtgacgctgctgctcccggacggcagcagtgcggagctctggactgggattaagaaggggcccccacgcaaa

SEQ ID NO: 12484 - DNA, 382 bp, Homo sapiens; identical to SEQ ID NO: 1020

SEQ ID NO: 12485 - DNA, 319 bp, Homo sapiens
actgacttcaagctatggtaaggactgtggcttctattctaatatgaatagtcttaggcaggcattgatggcttttaactacaccaactgcactatctgatatatacagtcctaaaggaccctaccttacagcctggacaacttagtgatcctatatctctacaaaaaaaatatttaaatcaattatccaagcatggtgctgcacaccttgtagccccagctatttatgaagctgcggcaggaggatctcataaggccaggagttggagactgctctgagctaccactgccagcctgagtgacagagcaagaccttgtt

SEQ ID NO: 12486 - DNA, 385 bp, Homo sapiens; identical to SEQ ID NO: 3995

SEQ ID NO: 12487 - DNA, 56 bp, Homo sapiens; identical to SEQ ID NO: 2931

SEQ ID NO: 12488 - DNA, 158 bp, Homo sapiens
ggcttttaaaaatctaatatgaggccaggcgcggtggctcacgcctgtaatcccagcactttgggaggctgaggtgggtagatcacgaggtcaggagatcaagaccatcctggccaacatggtgaaaccctgtctctactaaaaatacaaaaattagc

SEQ ID NO: 12489 - DNA, 88 bp, Homo sapiens
ggaaacatatttcttgtgaaatggacatatatcttttttatactccccataaaaagggatgtgagggcaaataaatttgggaaaaatg

SEQ ID NO: 12490 - DNA, 54 bp, Homo sapiens
gggagtgataccgtttgcctgtgtcttcacccaaatctcaacttgaattgtatt

SEQ ID NO: 12491 - DNA, 364 bp, Homo sapiens
  misc_feature 364: n = A,T,C or G
acgaattggagatgaagatgtaggccgggtgatctttggtctcttcggaaagactgttccaaaaacagtggataattttgtggccttagctacaggagagaaaggatttggctacaaaaacagcaaattccatcgtgtaatcaaggacttcatgatccagggcggagacttcaccaggggagatggcacaggaggaaagagcatctacggtgagcgcttccccgatgagaacttcaaactgaagcactacgggcctggctgggtgagcatggccaacgcaggcaaagacaccaacggctcccagttcttcatcacgacagtcaagacagccttgctagatggcaagcatgtggtgtttggcaan

SEQ ID NO: 12492 - DNA, 371 bp, Homo sapiens; identical to SEQ ID NO: 4006

SEQ ID NO: 12493 - DNA, 370 bp, Homo sapiens
atcaccaggtcaggacttcaagaccagcctggccaacatggtgaaaccctgtctctactaaaaatacaaaaatgagccaggagtggtgacgtgcgcctgtgatcccagctactcgggaggctgagacagaagaattgcttcaacctgggagttggaggttgcagtgagctgagatcgtgccactgcactccagcctgggtgatagcaagactccgtgtcttaaaataatataagtagaaaaaaatgtccataacgaacagacagcatatttactatttattaaaaggaaaagggatcttcatatcgggccatcgtgttttgattacacatatcagacatctcgttgcataatacgcgtcgatgtccaccc

SEQ ID NO: 12494 - DNA, 386 bp, Homo sapiens
agaataattgtaactcatattctagtggtcaatactgggatcatatgaaatacataagtagacatacaaactagaaatacattttagtttaaaatgaaaaatgtgggccgggcgcggtggctcacgcctgtaatcccagcactttgggaggctgaggtgggtggatcacgaagtcaggaggtcgagaccatcctggctaacatggttaaaccccgtctctactaaaaatacaaaaaattagccaggcgtggtggtgggcacctgtagtcccagctacttgggaggccgagacaggagaatggcgtgaacccacgaggcagagcttgcagtgagccgagattgcaccactgtactccagcctgggtgacagagcgagactctctccg

SEQ ID NO: 12495 - DNA, 116 bp, Homo sapiens
gttctgggcctagttgtcctccctcctggagccccggcctgtggtctgactcagcttcccctcctaatacatatggctgtttgccacctcgatcctataacacgagtttgggcccg

SEQ ID NO: 12496 - DNA, 472 bp, Homo sapiens
ctacaccaacctgcttccactttattcttgtttacacattctcctgctcccagatttggagggaagaaagcagaagaaaagatgcaggactgagatgattcatggaacccaagtccattaaaactggctgcccctcatctccaagcaatatattggtgggcttcaagtctctgtgggcataacccttggcatgaatggcctcaaggctcctgcagatccccagcagcagccaaaggatttgatcctcggtcaggaagttgcctttgtccttcagcctttctatctcattccacagcgtacctctcttgaagaatggtagcagcagccaggcctcatgcttagcaccccgttccctcagacagtaagccacgagggaaaggatgttggggtgattgaagaggcgatgcatgtcggcttctcgctgggcctcctcccggtcctgctgctcgtgaacaaggattcgcttcagggc

SEQ ID NO: 12497 - DNA, 628 bp, Homo sapiens
cataagcacaaaaaatttattctgaataaatcactttacaattactgaaaaagatgttcattaccttagctatgtacttaatgaaccaaattacccaaacaaaataaacatggcaatataaaaatgttaagaatttacaaagctgtacaaaataacttaaaatttaaaaattagactgatacagtctgtaagatctcttcgagagagctgtccaattacagatctatatacttttcttcagaaggtcaaagaaaggatgctttaaggcttctctgagagtaattcttttggctggatcatactccaacattttctgaatgaggtcaaagagacgctcatgttcaacatcttgagaaagcataaattccttcagaggtttacagcgtcttgaaacatatctgccggcagaactgtgttcatcccagtctaatcgatcgtggtgaaaatatttacgtttcctggttttctgtatcatatgttttggtagaggtccaagaatcctttccatcattgctaaatgctccttactatcgtgtgttggaaatacggtaaacccaagatagtattcaataagaatgcatcctatgctccagacatcacatggttgggaccaccctagggctaaaat

SEQ ID NO: 12498 - DNA, 457 bp, Homo sapiens
gggatcttggctcactgcaacctccacctccaaggttcaagcaattcttctgtctcagcctcctgagtagctgggattacaggcatgtgccaccacaccctgataatttttgtatttttagtagaaatggggtttcaccatgttggccaggctggtctcgaacccctgacctcaggtggccgacccgcctcgacctcctaaagtgctgggattacaggtgtgagccaccaagcctggataatagtatgactaaatttaatctaagactccctagaatgtgtcacaaaaaagcaaaaattgaataaactacagagcaagccaagcattaagactgccttgtgctttcctactcagtgtacaagtagagaaggcctgggatgcgccaggcactgtgcctgatagctcctcacttgaaataaacttacaaaagtgattgtatcccccctttaaagatgag

SEQ ID NO: 12499 - DNA, 353 bp, Homo sapiens
acagaagggctctgtgccaatacattaatatacaaactttctaatatcattaagaaataagtacatttaggccgggcagggtggctcatgcctgtaatcccagcactttgggaggctgaggcagggagatcacttgaggtcaggagttcgagaccaacctggccaccacggtaaactcatctctactaaaaatacaggaattagccaggagtggtggtgggcacctataatcccagctactagggaggctgaggcacaagaatcacttcaacctgagagacagaggtttcagtgagctgagatcgtgccaccacactccagcttgggcaacagtgtgagcaaaactctgtctc

SEQ ID NO: 12500 - DNA, 353 bp, Homo sapiens
gttctttgcaggtcataaaaagtgggagattcctttaactctggctgcatcccagagctttgtcactgtgtaaaagtggaatgccggccgggcacgctggctcacgcctgtaatcccaacactttgggaggccgaggcgggcggatcacgaggtcaggagatcgagaccatcctggctaacatggtgaaaccccgtctctactaaaaatacaaaacaaaattagccaggcatgatggcgggcacctgtagtcccagctactctgtaggctgaggcaggagaatggcgtgaacccgggaggcggagcttgcagtgagctgggattgcgccactgcactccagcctgggcgacag

SEQ ID NO: 12501 - DNA, 469 bp, Homo sapiens
cagaagggagaagtggagcctggaagtggaatcagggtcgagacaggaaggccagcctgcttcgggctcctccccttcctttgttcataggcctcagctgtgagagaagttaactgcccctgtgcctaggggacctgggttgggttgtccggggagtaagttctaaaggggccccttgtcttttgaggggccaggcggtagggtagggcttggctccagagggtagggaaccacagcagaagcaatgaagaggaggaatccgccaggtgcggtggcttacgcctgtaatcccagcactttgggatgctgaggcgggcagatcacaaggtcatgagttcatgaattcgagaccagcctggacaatacggtaaaaccccgtctctactaaaaatacaaaaattagctgggcatggtggcgcgcgcctgtagtcccagctactcgagaggctgaggcagaagaattgcttga

SEQ ID NO: 12502 - DNA, 380 bp, Homo sapiens
ctaattacggataatcacagtagaaaataaaacttgattccctttcctgcatggcttgagcatgaaataggagaagggacatgacaacctccgggtgtcgttactaattctttaaaaagttgtacttgcagccaggcacggtggctcactcctgtaatcctagcactttgggaggctgatgcaggcggattgcctgagctcaggagttcgagaccagcctgcgcaacatggagaaacgccgtctctactaaaaacacacaaaattagccaggaatggcagtgtgcacctgtagtcccagctactctggagactgaagcaggagaattgcttgaacccaggaggcagaggttgccctgagctgagatcgcaccactgcact

SEQ ID NO: 12503 - DNA, 125 bp, Homo sapiens; identical to SEQ ID NO: 1051

SEQ ID NO: 12504 - DNA, 380 bp, Homo sapiens
tctacggttgcgagaaaacgtcacaagggctgttggccaagcactgtggctcacgcctgcaatcccagcactttgggaggccaaggggggcggatcacctgagctccggtgttcaagaccaccctgggcaacatggtgaaaccctgtctctactaaaatacaaaaaattagccagacatggtggcatgcgcctgtagtctcagctactcaggaagccgaggcatgagaatcgtttgagctcaggaggcagaggttgcagtgagccaagatcacaccaccacactccagcttgggctacagagtgagactatgtctcataaaaaaaaagaacctctgttaaaggattccttttaatcctttccagagccagtatttatgtt

SEQ ID NO: 12505 - DNA, 384 bp, Homo sapiens; identical to SEQ ID NO: 4030

SEQ ID NO: 12506 - DNA, 221 bp, Homo sapiens; identical to SEQ ID NO: 4032

SEQ ID NO: 12507 - DNA, 492 bp, Homo sapiens
cagacgctagacgccgggcctacagcgggagcgtgaggaaagccgtgcgttgcgttccaaggcatctgtgagcccgcggagtatacaccatgagcaaagctcaccctcccgagttgaaaaaatttatggacaagaagttatcattgaaattaaatggtggcagacatgtccaaggaatattgcggggatttgatccctttatgaaccttgtgatagatgaatgtgtggagatggcgactagtggacaacagaacaatattggaatggtggtaatacgaggaaatagtatcatcatgttagaagccttggaacgagtataaataatggctgttcagcagagaaacccatgtcctctctccatagggcctgttttactatgatgtaaaaattaggtcatgtacattttcatattagactttttgttaaataaacttttgtaatagtcaaaaatgctttctcagatgttctgaatatagaatatcagctctcatt

SEQ ID NO: 12508 - DNA, 491 bp, Homo sapiens
gctaatgctgcatgcccgttgctgcctgaatcagaagggcaccatcttggggctggatctccagaactgttctctggaggaccctggtccaaactttcatcaggcacataccactgtcatcatagacctgcaagcaaaccccctcaaaggtgacttggccaacaccttccgtggctttactcagctccagactctgatactgccacaacatgtcaactgtcctggaggaattaatgcctggaatactatcacctcttatatagacaaccaaatctgtcaagggcaaaagaacctttgcaataacactggggacccagaaatgtgtcctgagaatggatcttgtgtacctgatggtccaggtcttttgcagtgtgtttgtgctgatggtttccatggatacaagtgtatgcgccagggctcgttctcactgcttatgttcttcgggattctgggatccaccactctatccgtctccattctgctttgggcga

SEQ ID NO: 12509 - DNA, 326 bp, Homo sapiens
ggtcatttcagaaaattcttcatagtggtattggccttatatttaactttttttttatttttttttttgagacaaagccacactctgtctccttggctggagtgggggggcacagtctaagctaactgcaacctctgcctcccagttaaagcaattcttctgcctcagcctcccaagtagctgggattacaggcacccgccaccacgcccagctaatatttgtatttttgtagagatggggtttcacgatgttggccaggctggtctcaaacttctgacctcaagtgatctgcccaccttggcctcccaaagtgctgggattacag

SEQ ID NO: 12510 - DNA, 219 bp, Homo sapiens
tctcttcttccttaaaggtactgtgcagagttctggccggacatggtggctcacgtctgtaatcccagcactttgggaggctgacggcgggtggatcacctgaggtccagagttcgagaccagcctgacaaacatggcgaaaccctatctctactaaaagtacaaaaattagctgggcgtggtggcgggtgcctgtaatcccagctactccggaggctg

SEQ ID NO: 12511 - DNA, 453 bp, Homo sapiens; identical to SEQ ID NO: 4044

SEQ ID NO: 12512 - DNA, 402 bp, Homo sapiens
ccctggatgtcctctatgggccggacacccccatcatttcccccccagactcgtcttacctttcgggagcgaacctcaacctctcctgccactctgcctctaacccatccccgcagtattcttggcgtatcaatgggataccgcagcaacacacacatgttctctttatcgccaaaatcacgccaaataataacgggacctatgcctgttttgtctctaacttggctactggccgcaataattccatagtcaagagcatcacagtctctgcatctggaacttctcctggtctctcaactggggccactgtcggcatcatgattggagtgctggttggggttgctctgatatagcagccctggtgtagtttcttcatttcaggaagactgacagttgttttgc

SEQ ID NO: 12513 - DNA, 379 bp, Homo sapiens
attggttttgggccaggcacggtggctcatgcctgtaatcccagcactttgggaggctgaggcaggtggatcacctgaggtcaggggttcgagaccagcctggccaacatggtgacaccccgtctctactaaaaatacaaaaattagctggatgtggtggcacacacctttaatcccagctgctcaggaggctgaggcatgagaatcacttgaagacagaggttgcaaggagctgaagttgcgccactgtactccagcttgagtgacagattgagaccgagtctccaaataataaataaaataattgcttttgccactgttattcatttgacataatcaaaaatgggactaaaagtacattatcatagaacccatgatt

SEQ ID NO: 12514 - DNA, 415 bp, Homo sapiens
gagtggcttgaggtatccgcaggagcggccgggtggcgggaggaaccgttacgggaactgaagttgcggattaagcctgatcaagatgacaacctcccaaaagcaccgagacttcgtggcagagcccatgggggagaagccagtggggagcctggctgggattggtgaagtcctgggcaagaagctggaggaaaggggttttgacaaggcctatgttgtccttggccagtttctggtgctaaagaaagatgaagacctcttccgggaatggctgaaagacacttgtggcgccaacgccaagcagtcccgggactgcttcggatgccttcgagagtggtgcgacgccttcttgtgatgctctctgggaagctctcaatccccagccctcatccagagtttgcagccgagtagggac

SEQ ID NO: 12515 - DNA, 463 bp, Homo sapiens
gtgccagacagcacagactttccaggacagccctgcgtaaaacagcctgccttgctggtgccccaccaggaaagtacactgggtacttgatgcttgatcttgcacagaaaagatggccatgggccgggcatggtggctcacgcctgtaatcccagcactttgggaggccgaggcaggtggatcacctaaggtcaggagttcgagaacagcctaacatggtgaaaccccatctctactaaaaatacaaaccttagtcgggcatggtggcatgtgcctgtaatcccagctacttaggaggatgaggcaggagaattgcttgaggtcaggagttcgagaccagcctgactaacatggtgaaaccctgccactactaaaaatacaaaacgtagctgggcatggtggcccatgcctgtaatcccagctactcgggaggctgaggcagaagaatagcttgaatctgggt

SEQ ID NO: 12516 - DNA, 181 bp, Homo sapiens
aattacctaaatgctagtcttacagaaagtaatcagccgggcgcggtggctcacgcctgtaatcccaacactttgagaggccaaggcaggcggatctcttgaggttaggattttgagaccagcctggccaacatggtgaaaaacccgtcttgactaaaaatacaacaattagctgggcatg

SEQ ID NO: 12517 - DNA, 251 bp, Homo sapiens
  misc_feature 251: n = A,T,C or G
gagaagacgacagaagggaagaactagccttggagtcaggcctccaaccaagtagatctgtcagagattgatttggttgggaagctaatggaggaggaggagtactgtaagtagctgaaaccatctaattgatgtgggctaaagatgatttagagaactaagaaaggaaagagaaggaaggaaggaagagagggagggaggtgagcaaggggagggaggtgttacaaggggagaaggagagagagacatan

SEQ ID NO: 12518 - DNA, 115 bp, Homo sapiens
tgcctgggaacccccattttgcctgggaacccccattttgcctgggaacccccattttgcctgggaacccccatttttgctgggaaaccccatttttgctgggaaaccccattct

SEQ ID NO: 12519 - DNA, 366 bp, Homo sapiens
gagacaaaagcaactgaggtgggcccaatggcatccatgatgggcagaggcacacacatcgctccgctctgtccactcaaaaaagcagcaaaggctgggcgcggtggcacgcgcctataatcccagcactttgggaggccaaggcgggcggatcatgacgtcaggagatcgagaccatgctggctaacacggagaaaccccatctctactaaaaatacaaaaaattagccgggcgcggtggctggcgcctgtagtcccagctactccggaggctgaggcatgataatggcgtgaacccaggaggcggagcctgcagcgagccaagatcgtgccactgcactccggcctgggcgaaagagcaagact

SEQ ID NO: 12520 - DNA, 441 bp, Homo sapiens; identical to SEQ ID NO: 4083

SEQ ID NO: 12521 - DNA, 356 bp, Homo sapiens
cttgagccttatagatgcattttgaacagctacaaaggacagcatgaaacctgaagttaaaagtgtcggcccggccaagtggggtgtctcacgcctataatcgtagcgctgtgggaggcccatgtgggtggatcatctgaggtcgggagtttaagaccagcctggacaacatggagaaactcccgtctctactaaaaatacataacttagctgggcgtggtggcacacacctgtaatcccagctactcagtaggctgaagaaggataattgcttgaacccaggaggtggagattgaagtgagctgagatcgtaccactgaactccagtctgagctaagggagggagacttcatctt

SEQ ID NO: 12522 - DNA, 130 bp, Homo sapiens
gaatttgtgtttacatatctgacatggaatgcaactgtgctagccaagattcggtgtagcttaccagccagaaatcacatatcctaacaggtagaaatgcattgcattttgtaaaactgcgcagctatgc

SEQ ID NO: 12523 - DNA, 359 bp, Homo sapiens
ggcgcacggtggagccgccagctgagaaggactctgatccggctcagctttccaatcagctgtggaaggagccacgctttctggggttgcaagatggcggccagcagtggaactgatgagccggtttccggggagttggtgtctgtggcacatgctctttctctcccagcagagtcgtatggcaacgatactgacattgagatggcttgggccatgagagcaatgcagcatgctgaagtctattacacgctgatttcatcagtggacccacagttcctgaaactcaccaaagttgatgacctaatttactctgagttccggaaaaattttgagacccttaggatagatgtgttggaccc

SEQ ID NO: 12524 - DNA, 404 bp, Homo sapiens; identical to SEQ ID NO: 4086

SEQ ID NO: 12525 - DNA, 146 bp, Homo sapiens
ctcctgacctgaactgatccacccgcctcagactcccaaagtgctaggattacaggtgtgagccactgcacgcgggcctgcccccagtctcgaccattctactaattttaaagacctcttggaattttacactcttggaatcatag

SEQ ID NO: 12526 - DNA, 443 bp, Homo sapiens; identical to SEQ ID NO: 4087

SEQ ID NO: 12527 - DNA, 330 bp, Homo sapiens
gaaagataatgttgaaagtgctcaagcatctgaagtcaaacctctgagaagctgaatttgaaaaggaatgtttgaatttatatagcaagtgctatttcagcaacaaccatctcatcctattacttttcatctaacgtgcattataattttttaaacagatattccctcttgtcctttaatatttgctaaatatttcttttttgaggtggagtcttgctctgtcgcccaggctggagtacagtggtgtgatcccagctcactgcaacctccgcctcctgggttcacatgattctcctgcctcagcttcctaagtagctgggtttacaggcc

SEQ ID NO: 12528 - DNA, 417 bp, Homo sapiens
aactgacttccaagaacaaattgttaaaactttaacagaaaaaccagttaaaggcgctcatcaagagagtccttttcatttggtataaatccaaaactatgaaaataccttttgtattatgtgcatgcagaaaattaagaatttattcaatttgcagaaataaatcagtgatataatggaaacatttaaaattttatctctggaaaataatccaaaatcatctatcaaaaattataggccgggcgcagtggctcacgcctctaatcccagcactttgggaggccgaggtggatggatcacctgaggtcaggagttcgagaccagcctgaccaacgtggagaaaccccatctctactaaaaatacaaaaaaaattagccaggtgtggtggcgcatgcctgtaatcccagctactcggg

SEQ ID NO: 12529 - DNA, 547 bp, Homo sapiens
ccaagaattcggcacgagaaagattctccaataagacacagtagagtctctagccaaaagtgattgaggtcccttcatctctgctgtttgttcaatgtaaattagccatcatcctccctgtttgtttttctcatcttcccacatgggctcaacaccatccttaaaaagtgagtagtcacagccagacattaaattactagacaactggatatggttgtacagagcccaaaagtcaacaggatcaaacttagagatcagcggcaggtttgcttgtcaagttttgcttttatcttttttaaaaaaaccagagtgcccatctgttctgtagaggatgtttaatatagtgttctgggttagcaacctcctgattagattctgttttctcctcttcacagggggattaggagtaggggtggtttctggtttgacagtccgccgtcttacatcgatctgctcctgcttttaactctgctcttgtttcctaccactggcctgggagccagccttttcagttctctcactgacaaactttcagttcttatttatc

SEQ ID NO: 12530 - DNA, 502 bp, Homo sapiens
agttactgaaaatctgggtagtaaatctacccaattaaaatggcactttataaaagggaatagagaagagatgggactatttctatatttaaatgctgctggctattcctttgtatataaatgaaaaataccattcattaaaattaagtactcgtttaagtatggttcttaattacatttcattcatttatattagagtaaatggcttcataactactttaaaatttaacccacaagcatattaaatctgtttgttataagattggaaacaatttttgagagggactaatttaaacaagtcctcctttagtcttctgggtcgcgtagttgctgaaacctaagtacctgcagcctacaggataaggaagttcacagcctgcggggtgaatgaacccatgtgtgaactgcacagagcaattcatagaaaatgcatacaaatttgtaacactttggtcacatctgtctctagatgggcattgaatttgtttaaagatggatgaaa

SEQ ID NO: 12531 - DNA, 342 bp, Homo sapiens; identical to SEQ ID NO: 4103

SEQ ID NO: 12532 - DNA, 337 bp, Homo sapiens
gaatgtattgaaggattactttttaggtagacttgagaaaaatatgagacacagaaggaaaggaattaatcagagaaagaacgcttgcagtcctagcactttgggaggccaaggcaggtggatcacctgaggtcgggagttcgagaccagcctgaccaacatggggaaaccccatctctactaaaaacacaaagtggccgggcacggtggctcactcctgtaatcccaccactttgggaggccaaggcgggcagatcacgagctcaggagattaagaccatcctggctaacatggtgaaaccccgtctctactaaaaatacaaaaaactagccgggc

SEQ ID NO: 12533 - DNA, 323 bp, Homo sapiens
gcctccacctcccggattcaagcgattctcctgacttagcctcccaagtagctggggttacaggcgcctgccaccacgcccggctaattttttgtatttttagtagagacggggtttcgccatgttggccaggatggtctggatctcctgatttcatgatctgcccgccttggcctcccaaagtgtggggatgacaggtgtgagccaccgcgcccggccgagaacctgtctcttttaaacaaacaaacaaaaaataaaatacaagaggagagataacctaaaggaaagcctgttaaacaacaaggagccaggaattgctagtt

SEQ ID NO: 12534 - DNA, 486 bp, Homo sapiens
ggagtctctttgcggcgctacactagagcagagtacgagtctgaggcggagggagtaatggcaggacaagcgtttagaaagtttcttccactctttgaccgagtattggttgaaaggagtgctgctgaaactgtaaccaaaggaggcattatgcttccagaaaaatctcaaggaaaagtattgcaagcaacagtagtcgctgttggatcgggttctaaaggaaagggtggagagattcaaccagttagcgtgaaagttggagataaagttcttctcccagaatatggaggcaccaaagtagttctagatgacaaggattatttcctatttagagatggtgacattcttggaaagtacgtagactgaaataagtcactattgaaatggcatcaacatgatgctgcccattccactgaagttctgaaatctttcgtcatgtaaataatttccatatttctcttttataataaactaatgataactaat

SEQ ID NO: 12535 - DNA, 186 bp, Homo sapiens; identical to SEQ ID NO: 4116

SEQ ID NO: 12536 - DNA, 386 bp, Homo sapiens; identical to SEQ ID NO: 4123

SEQ ID NO: 12537 - DNA, 467 bp, Homo sapiens; identical to SEQ ID NO: 2913

SEQ ID NO: 12538 - DNA, 458 bp, Homo sapiens; identical to SEQ ID NO: 4128

SEQ ID NO: 12539 - DNA, 405 bp, Homo sapiens
cagaagggggggcagccatggcgtcctatttcgatgaacacgactgcgagccgtcggaccctgagcaggagacgcgaaccaacatgctgctggagctcgcaagggcacttttcaataggatggactttgaagacttggggttggtagtagattgggaccaccacctgcctccaccagctgccaagactgtggttgagaacctccccaggacagtcatcagaggctctcaggctgagctcaagtgccccgtgtgtcttttggaatttgaggaggaggagactgccattgagatgccttgccatcaccttttccattccagctgcattctgccctggctaagcaagacaaattcctgtcccttgtgccgctatgagctgcccactgatgacgacacttatgaggagc

SEQ ID NO: 12540 - DNA, 379 bp, Homo sapiens; identical to SEQ ID NO: 4138

SEQ ID NO: 12541 - DNA, 295 bp, Homo sapiens
tctcttcttccttaaaggtactgtgcagagttctggccggacatggtggctcacgtctgtaatcccagcactttgggaggctgacggcgggtggatcacctgaggtccagagttcgagaccagcctgacaaacatggcgaaaccctatctctactaaaagtacaaaaattagctgggcgtggtggcgggtgcctgtaatcccagctactccggaggctgaggcaggagaatcacttgaacccaggaggcagaggttgcagtaagccgagatcatgccactgcactccagcctggg

SEQ ID NO: 12542 - DNA, 505 bp, Homo sapiens; identical to SEQ ID NO: 4148

SEQ ID NO: 12543 - DNA, 462 bp, Homo sapiens; identical to SEQ ID NO: 4160

SEQ ID NO: 12544 - DNA, 526 bp, Homo sapiens
gggctcaataccccaagcaatacctgcaactgaggattcttcccggggagaccgcagcccatcggcatggctcaagagtttgtgaactgcaaaatccagcctgggaaggtggtcgtgttcatcaagcccacctgcccgtactgcaggagggcccaagagatcctcagtcaattgcccatcaaacaagggcttctggaatttgtcgatatcacagccaccaaccacactaacgagattcaagattatttgcaacagctcacgggagcaagaacggtgcctcgagtctttattggtaaagattgtataggcggatgcagagatctagtctctttgcaacagagtggggaactgctgacgcggctaaagcatattggagctctgcagtaaccacagatctcataggaaatgttcaacaattctgtgaaaggtcacaggacccaattggagaaatcataaaaagcatagttggtcttggtgtcatatggatcacaggcacaagtgcagatgctgtggtcatgcggaacac

SEQ ID NO: 12545 - DNA, 503 bp, Homo sapiens
acagaagggtaaagacccaattacagaatttgttgaatgtttatatgttaactttgactttgatggggctcagaaaaagctgagggaatgtgaatcagtgcttgtgaatgacttcttcttggtggcttgtcttgaggatttcattgaaaatgcccgtctcttcatatttgagactttctgtcgcatccaccagtgtatcagcattaacatgttggcagataaattgaacatgactccagaagaagctgaaaggtggattgtaaatttgattagaaatgcaagactggatgccaagattgattctaaattaggtcatgtggttatgggtaacaatgcagtctcaccctatcagcaagtgattgaaaagaccaaaagcctttcctttagaagccagatgttggccatgaatattgagaagaaacttaatcagaatagcaggtcagaggctcctaactgggcaactcaagattctggcttctactgaagaccataaagaaaagatg

SEQ ID NO: 12546 - DNA, 387 bp, Homo sapiens
tgatcaagtgttacttatctaataatcctctagaaagaaccctgttagatcttggtttgtgataaaaatataaagacagaagacatgaggaaaaacaaaagggttgaggaaatcaggcatatgactttatacttaacatcagatcttttctataatatcctactactttggttttcctagctccataccacacacctaaacctgtattatgaattacatattacaaagtcataaatgtgccatatggatatacagtacattctagttggaatcgtttactctgctagaatttaggtgtgagattttttgtttcccaggtatagcaggcttatgtttggtggcattaaattggtttctttaaaatgctttggtggcacttttgtaaac

SEQ ID NO: 12547 - DNA, 342 bp, Homo sapiens
  misc_feature 313: n = A,T,C or G
tacaaataaaatgtttaagatatatgcagggccaggtgtgatggctcatgcctgtaatcccagcactttgggaggccgaggcaggcagatcacctaaggtcaggagtttgagaccagcctggccaacgtggtgaaacctcatttctactaaaaatacaaaaaactagcagggcgtggtgacgggcacctgtagttgcagctactcaggaggctgaggcagaaaaatcgcttgaacctgggaggaggaggttgcagtgagccgagatcgcgccattgcactccaccctgggagacaagtgaaactccatctcanaaaaaaaaaagatatatgcggaagtattg

SEQ ID NO: 12548 - DNA, 280 bp, Homo sapiens
gggcagaaagaagtatttccaacctagaaattctatatatacccagcgaaaatatctcttaaaaagatatccaaggctgggcgtgacggctcacgcctataatcccaatactttgggaggccaaggcaggtggataacctgaggtcaggagttcgagacaagcctggccaacatggagaaaccctgtctatactaaaaatacaaaaattatcccggcgtggtggcatgtgcctgtaatcccagctactagggaggctgaggcaggagaatcacttgaatc

SEQ ID NO: 12549 - DNA, 270 bp, Homo sapiens
ggatcccctgcgtggctgggctgctcgggttagatcggcaggaaaagcctaaagattagactgtaagaaaagaaaatagaagccatgtttcgaagacctgtgttacaggtacttcgccagtttgtaagacatgagtccgaaacaactaccagtttggttcttgaaagatccctgaatcgtgtgcacttacttgggcgagtgggtcatgacctgtcttgagacacgtggaaggaaaaaatccagccacaatattttctctagcaactaatg

SEQ ID NO: 12550 - DNA, 517 bp, Homo sapiens
ggtcgaccggcgggaagatggcggacattcagactgagcgtgcctaccaaaagcagccgaccatctttcaaaacaagaagagggtcctgctgggagaaactggcaaggagaagctcccgcggtactacaagaacatcggtctgggcttcaagacacccaaggaggctattgagggcacctacattgacaagaaatgccccttcactggtaatgtgtccattcgagggcggatcctctctggcgtggtgaccaagatgaagatgcagaggaccattgtcatccgccgagactatctgcactacatccgcaagtacaaccgcttcgagaagcgccacaagaacatgtctgtacacctgtctccctgcttcagggacgtccagatcggtgacatcgtcacagtgggcgagtgccggcctctgagcaagacagtgcggctcaacgtggtcaaggtcaccaaggctgccgggcaccagaagcagttccagaagttccaaggctggacatcggcccgctcccc

SEQ ID NO: 12551 - DNA, 82 bp, Homo sapiens
acaggaatatattacctatatacaaagtattatttaacaaccttgtattttagtcatacatctttaaccgtattagatttaa

SEQ ID NO: 12552 - DNA, 80 bp, Homo sapiens; identical to SEQ ID NO: 4177

SEQ ID NO: 12553 - DNA, 149 bp, Homo sapiens
atgacccaccaatcacatgcctatcatatagtaaaacccagcccatgacccctaacaggggccctctcagccctcctaatgacctccggcctagccatgtgatttcacttccactccataacgctcctcatactatgcctactaaccaa

SEQ ID NO: 12554 - DNA, 56 bp, Homo sapiens
gatgtaatccttgggtttctttctgcattctttccttcttttgagatatctcctgt

SEQ ID NO: 12555 - DNA, 323 bp, Homo sapiens
gaagtctcaaggttctatttttaagataatccaaagtgatgggctgggtgcagtggctcacacttgtaatcccagcactttgggaggccgaggtgggcggatcacttgaggttaggagttggagaccagcctggccaacatggcaaaatcttgtctctactgaaaatacaaaaattagctgggtgtggtggcggtcctctgtagtcccagctactcgggaggctgaggcaggagaatttcctgaacctgggaggcagaggttgcagtgagctgagattgtgccactgcacttcagcctaggtgacagagggagactccatcac

SEQ ID NO: 12556 - DNA, 159 bp, Homo sapiens
tataaacatatcattagaaaaatgtagataggaggccgggcgcagtggctcacgcctgtaatcccaacattttgggaggccgaggtgggtggatcacgaggtcaggagatagagaccatcctggctaacacggtgaaaccccatctctactaaatatac

SEQ ID NO: 12557 - DNA, 418 bp, Homo sapiens
tcttacataaagaagtccagggttggacgtggtggctcacgcctgtaatcccagcactttgggaggccgaggcgggtggatcatgacgtcagcagatcaagaccatgctggccaacatggagaaaccccgtctgtactaaaatacaaaaaattagccaggcgtgatgctgagcacctatagtcatgctatttgggaggctgatgcctgggaatcacttgaacccaggaggcggagattgcaatgagccaagatcacaccagtatacgccagcctggcaacagagcgaaactccgtctcaaaaaaaatatctccgaatattaaaaagtctagaggtggccaggcacggtggctcatgcctgtaatcccagcactttgggaggccaaggtgggtggatcacaacgtcaggagttcaagac

SEQ ID NO: 12558 - DNA, 93 bp, Homo sapiens
ggtgtcccagatgtagtattcccacaggggtctggcaggcccctcctgtaaccactccagtcacattttctgctcttgaggcagaggtgacat

SEQ ID NO: 12559 - DNA, 249 bp, Homo sapiens
accccgtctctactaaaaatacaaaaattagctgggtgtggtggcacacacctgtagtcccaactactcgaaaggctgaggcaggagaatcaattgaacccaggaggcagaggttgcagtgagccaagattgcgccactgcactctagcctggcaacagagactccgtctccaaaaaaaaaaaggggtttttgaagagggaccaaaattccttttttaaaaaaaaattccttttttaaaatttaagggg

SEQ ID NO: 12560 - DNA, 238 bp, Homo sapiens
ggaaacatggcactgttgcctatcagaagtcaattcaaaggacctgcccccagagagacaaaagatacagatattgtggatgaagccatctattacttcaaggccaatgtcttcttcaaaaactatgaaattaagaatgaagctgataggaccttgatatatataactctctacatttctgaatgtctgaagaaactgcaaaagtgcaattccaaaagccaaggtgagaaagaaatgt

SEQ ID NO: 12561 - DNA, 353 bp, Homo sapiens
ggcctcccaaagtgccaggattacaggtgtgagcctccacatccagcccattcattattacttttattacttattaggcaattttccaaaacaaaagctagaaatcaggccaggcacagtggctcatgcctgtaatcccagcacttagtgaggctgaggcaggaggatcacttgaggtcaggagttcaagaccagcctggccaacatggtgaaaccccatctccactaaaaatacaaaattagccaggtgtagtggtgggcgcctgtaatcccagctactcaggaggctgaggcaggagaatcacttgaacctgggaggcagaggtagcagtgagccgagatcgtgcgactgg

SEQ ID NO: 12562 - DNA, 386 bp, Homo sapiens; identical to SEQ ID NO: 4192

SEQ ID NO: 12563 - DNA, 528 bp, Homo sapiens; identical to SEQ ID NO: 4197

SEQ ID NO: 12564 - DNA, 135 bp, Homo sapiens
acctggaggcgtctgcagagtgtgcgcagttcttcagtatttagagcatcgatcctgcggtgatactcagccactgacactacctaaatatggagacaggaagacaataattccactgacagttgagaaaaacag

SEQ ID NO: 12565 - DNA, 77 bp, Homo sapiens
gtggtgcacagaggctgcagtgagtggagatcgcaccattacactccagcccgggcgacagtgcgagactccatctc

SEQ ID NO: 12566 - DNA, 494 bp, Homo sapiens
ggttatttagctgtttgcgataaatcttgatactgttcactctttgggtccacactgcctttatgagctgtaagactcaccatgaaggtcttcagcttcactcctgaagccatcgagaccacgaacccaccaggaggaatgaacaactccagaggcgccgccttaagagctgtaaaactcatggcgaaggtctgcagcttcacacctgagccagcaagaccacgaacccaccagagggaagaaactcagaacacatccgaacatcagaaggaacaaactctggacatgccgcctttaagaactgtaacactcaccgcgagggtcggcggcttcattcttgaagtcagtgagaccaagaacccaccaattctagacacaagaggatttggtggggaagacagaggaaatgggaagcccctaagttaggaatacgcttggcaagtccaaggagcagcaaggtgtccactgtggctgcagcagcatgagtaagggag

SEQ ID NO: 12567 - DNA, 820 bp, Homo sapiens; identical to SEQ ID NO: 266
  misc_feature 543, 662: n = A,T,C or G

SEQ ID NO: 12568 - DNA, 476 bp, Homo sapiens; identical to SEQ ID NO: 4200

SEQ ID NO: 12569 - DNA, 437 bp, Homo sapiens
tctcactggcagctgcatctggtggcgccaaggagctaaagaacatccacgtgtgcctgggtggcctgttcgtgcctgaggcgtacatcactgccaccaggcagtatgtggcccaggccaacagctggtccctggaggagctctgcctggaagtcaacgtcaccacctcacagggcgccacccttgacgcttgcagcttcggagtcacgggtttgaaacttcaaggggccacgtgcaacaacaacaagctgtcactgtccaatgccatctcaaccgcccttcccctgacgcagctgcgctgggtcaagcagacaaacaccgagaagaaggccagtgtggtaaccttacctgtctacctgaacttcacccgtgcagacctcatcttcaccgtggacttcgaaattgctacaaaggaggatcctcgcagcttctacgag

SEQ ID NO: 12570 - DNA, 322 bp, Homo sapiens
  misc_feature 235, 322: n = A,T,C or G
gtggatcatgaggtcaggagatcgagaccatcctggctaacaaggtgaaaccccatctctactaaaaatacaaaaaattaaccgggcgcggtggcgggcgcctgtagtcccagctactcgggaggctgaggcaggagaatggcgtgaacccgggaagcggagcttgcagtgagccgagattgcgccactggcagtcgcagtccggcctgggcgacagagcgagactccgtctcanaaaaagaaaaacaaaacaaaacaaaaatgagactgggcgtggtggctcacactttgggattccaaaagtgaggaataatcccaacan

SEQ ID NO: 12571 - DNA, 485 bp, Homo sapiens; identical to SEQ ID NO: 4218

SEQ ID NO: 12572 - DNA, 370 bp, Homo sapiens
ctcactcttgtcacccaggctggggtgcaatggcgtgatcttggctcactgcacgctccgcctcccgggttcaatgattcccctgcctcagcctcccgagtagctgggattacaggtgcctgccaccatgcccagctaatttttgtatttttagtagagacaggtttttgccatgttggccaggctggtctcgaactcctgacctcaggtgatctgcccgcctcggcctcccaaactgctgggattacaggcgtgagccaccatgcctggccagcttatcaaaactttaaggagtactgaaaatcatttagaagttagtaagttatagtctttatacaaaaaagagtcaagtgttcatgttgtataacta

SEQ ID NO: 12573 - DNA, 246 bp, Homo sapiens
tttctacgggtgccaaaagactacagaagggggagcggagcccggagcgtcgtggaaagcattggacacatttccaccatgctaatggcattttaaatatatttggcaattttcccaattttttactgaagaaaacggtgagtttatacttgaggactgaagtgtgactctgccgattatcaagctttcaagaagaatctggaaaaactcaccaagcctgaactcctgacactatttattattctt

SEQ ID NO: 12574 - DNA, 332 bp, Homo sapiens
gaaggggagaccctgtctcaaaaaggaaaaaaaaataaaaaggccgggcatggtggctcatacctgtaatcccagcactttgggagactaaggcaggcggatcacttgaggtcaggagtttgaggccagcctggtcaacctggtgaaacctcatctctaagaaaaatacaaaaattatccaggcgtggtggcaggaacctgtaatcccagctactcaggaggttgaggcaggagaatcacttgggcctaggaggtagaggttgcactgagccaaaattgcaccactgcactctaacctgggcaacagagcaagactcctcaaaaaaaaaagg

SEQ ID NO: 12575 - DNA, 340 bp, Homo sapiens
gctggtgctctagggtgagctctgcccggctgcagggatggcggggaggggtaagctcatcgcagtgatcggagacgaggacacggtgactggtttcctgctgggcggcataggggagcttaacaagaaccgccatcccaatttcctggtggtggagaaggatacaaccatcaatgagatcgaagacactttccggcaatttctaaaccgggatgacattggcatcatcctcatcaaccagtacatcgcagagatggtgcggcatgccctggacgcccaccagcagtccatccccgctgtcctggagatcccctccaaggagcacccatatgacgccgcg

SEQ ID NO: 12576 - DNA, 482 bp, Homo sapiens; identical to SEQ ID NO: 4234

SEQ ID NO: 12577 - DNA, 329 bp, Homo sapiens; identical to SEQ ID NO: 4236
  misc_feature 228, 229, 230, 231, 232, 233, 234, 235, 236, 237, 239, 241,242, 243, 244, 245, 246, 247, 248, 249, 251, 252, 253, 254,255, 257, 259, 262, 263, 264, 265, 266, 267, 268, 269, 271,272, 273, 274, 275, 276, 278, 279, 280, 281, 283, 284: n = A,T,C or G
  misc_feature 286, 292, 294, 295: n = A,T,C or G

SEQ ID NO: 12578 - DNA, 303 bp, Homo sapiens
aatgactcagtgagttttctcatttataaaataggatgtttcctcccagggtgggggtgaagtgggtgagatgacccatttgaagcacagtggacccttgaacaatgcaatggttgggcagtcaattcacataaaacttttgatctgagttgggcagatcacctgagattaggagtttgagaccagcgtgaccaacatggagaaaccctgtctctactaaaaatacaaaattagccgggcatggtggcacacgcctgtaatcccagctactcgggaggcagaggcaggagaatcacttgaacc

SEQ ID NO: 12579 - DNA, 102 bp, Homo sapiens
cagaagggtgacaaccagggtgcaggagaacaaggtagaccagtgaggcagaatatgtatcggggatatagaccacgattccgcaggggccctcctcgccaa

SEQ ID NO: 12580 - DNA, 339 bp, Homo sapiens
  misc_feature 339: n = A,T,C or G
ggggcttgttcgctggtggcgtcggagccgagccggactggtcaggatgatcacgggcgtgcagctcgccatcttcgccaacatgctgggcgtgtcgctcttcttgcttgtcgttctctatcactacgtggccgtcaacaatcccaagaagcaggaatgaaagtggcgctttctccgccccagggttccgggacatagtctgaggcaagatggagggtatgaggggccttcacacttcacttcatcccttctacccatcacaacatacaaagcaactacacctggatttttccaaacaacttttatttcctcagagtcttccttaatcctatggaacan

SEQ ID NO: 12581 - DNA, 277 bp, Homo sapiens
gatttgtggtgagattctctcccaggccacaagacatttcctgctcggaaccttgtttactaatttccactgcttttaaggccctgcactgaaaatgcaagctcaggcgccggtggtcgttgtgacccaacctggagtctgtcccggtcccgccccccagaactccaactggcagacaggcatgtgtgactgtctcagcgactgcggagtctgtctctgaggcacattttgtttcccgtgccttgggtgtcaagttgcagctgatatgaatgaatgc

SEQ ID NO: 12582 - DNA, 381 bp, Homo sapiens; identical to SEQ ID NO: 4246

SEQ ID NO: 12583 - DNA, 233 bp, Homo sapiens
gcctatcccacttcacaggtgaggcatggcaattctggaagctgattaaaacacacataaaccaaacaacaggcccttgggtgaaaggtgctatataattgtgaagtattaagcctaccgtatttcagccatgataagaacagagtgcctgcattcccaggaaaatacgaaaatcccatgagataaataaaaatataggtgatgggcagatcttttctttaaaatataaaacg

SEQ ID NO: 12584 - DNA, 360 bp, Homo sapiens
ttcattatccagttctattgagtcatttagcaatatttcttacaatatttcaatcagcttccaaatattttaaaaatctacctcttaaaaattaatttctggctggcgtggtggctcacgcttataatcccaacactttgggaagctgaggcaggcagatcacctaaggtcaagagttcgagtccagcctggccaacatggcgaaaccctgtctctactaaaaatacaaaaattagccgggcatggtggcaggcgtctgtaatcccagctactcgggaggctgaggtagggagaattgcttgaacccaggaggtggaggtttcagcgagccgagattgcaccactgcactccagccctgg

SEQ ID NO: 12585 - DNA, 878 bp, Homo sapiens
cctgttgctgagctgcttttctgaattcctctggtgctgccttggctattccctgatccggtaatgctccatatttccgatgttgctcataccagtcactcaccgtcatagttggcagacttggataaccagctccaaatactttggcttgagccatgttccgagtgagaatgaagggtttcactggaggcctctcctggcgagatgagttagaagttgatgcctctcttgaagagtctctttctctcaggatctttatttcctggtcaatgctctcaatctcttctaagctgatatcaatccacctctgaaggtgaagaagataatattcacgaacacgctcatcatctgcttgaccactttccacagcagatttcattgcagacaacctatgctccaactccttcttctgcttgtatctctgtattttagcctgtctttgagatgccatagcaacgagactaggataagccatggaggaattggcagtgtgattttcagcagagttgttcatggttttgggcagctcaaactctgccacatgatagcaatggcactgagttaagtagtttatacagtgttctcgagccccgctgcaaatgatctagactcctgctggggttgacttgtttcaatgggaggggctccttgaaaagcctggaccccaaaaggtaatcaagtgcgtgggggacaaatctttccaaaatctacattcgcggccgaacaaggtggactgggaataacatttcggcagccctcctcaaggaggtccaaagcccttgaacacttcctccgggactatcccggaaacggcggggtcaagtcgccacttctacttcctccagtaactgtctacagtttccgaacagctcggggac

SEQ ID NO: 12586 - DNA, 533 bp, Homo sapiens
atacttttagtgtattattaagcaaatattaatttaatcatataaaccaatcctggtcagcaaaaagcactgttagctgccatgtaaaggtccttctgtcaagtaaaacttcattctacacttctagcttcctatcagaggaacttcttgaaggaactctttcagttggctttacaactcatctgcaacaccaaatgtggattaaattcagatcacaccttggttgtgtatatatgtatataacagcccctggcacaattagctaatatcttgtaattgtaaacgaattgttctcttttagccatttcccccccatttcctataacggtctttatccaaatgctttggtgctccataagtaactgtgagtcagaggtgcctcagtgctggagatgcctgtcacagagaagatcagaatgtgtgaagataaccctgcattacgttcatctcatcagttctgtccaatccacaggggtaaaaaatggatgagatttgatattctcaacacccagcactccagcaccaagtcgttc

SEQ ID NO: 12587 - DNA, 227 bp, Homo sapiens
  misc_feature 139, 140, 141: n = A,T,C or G
attaatcccctggcccaacccgtcatctactctaccatctttgcaggcacactcatcacagcgctaagctcgcactgatttttttacctgagtaggcctagaaataaacatgctagcttttattccagttctaaccaannnaaaaaaaaaaaaaaaaaaatttttgggggcggttttttccgtaatcccaaccttgataaaaaccttggtggagttgggacaacccc

SEQ ID NO: 12588 - DNA, 319 bp, Homo sapiens
gaacatagaaaagaaaattaagactgtgtttcagggctgggcatggtggctcacacctgtaatcctagcactttgggaggccgaggtgggtagagcaccacaggtcaggagttcaagattagcccagccaacatggtgaaatctcgtctctactaaaaatacaaaaattagttgggcgtggtggtggccacctgtaatctcagctactcaggaggcagaggcaggagaattgcttgaacctgagaggtggaggttgcagtaacctgagatggtgccatcacactccatactgggcaacaagagtgaaactctgtctcaa

SEQ ID NO: 12589 - DNA, 395 bp, Homo sapiens; identical to SEQ ID NO: 4271

SEQ ID NO: 12590 - DNA, 353 bp, Homo sapiens
gggaggttggcgaggctttgctgaaagctagcaaaccgagcgatcatgtcgcacaaacaaatttactattcggacaaatacgacgacgaggagtttgagtatcgacatgtcatgctgcccaaggacatagccaagctggtccctaaaacccatctgatgtctgaatctgaatggaggaatcttggcgttcagcagagtcagggatgggtccattatatgatccatgaaccagaacctcacatcttgctgttccggcgcccactacccaagaaaccaaagaaatgaagctggcaagctacttttcagcctcaagctttacacagctgtccttacttcctaacatctttctgata

SEQ ID NO: 12591 - DNA, 325 bp, Homo sapiens
gagggctcactgagaaccatcccggtaacccgatcaccgctggtcaccatgaaccacattgtgcaaaccttctctcctgtcaacagcggccagcctcccaactacgagatgctcaaggaggagcaggaagtggctatgctgggggtgccccacaaccctgctcccccgatgtccaccgtgatccacatccgcagcgagacctccgtgcctgaccatgtggtctggtccctgttcaacaccctcttcatgaacacctgctgcctgggcttcatagcattcgcgtactccgtgaagtctagggacaggaagatggttggcgacgtga

SEQ ID NO: 12592 - DNA, 237 bp, Homo sapiens
aagtgacttgctcaaagtctcactgttactcagtggcaaaacaagactagaatttgggtttcctggtccataacctgtcactttcttttttcttaactacaatacctcctttatgaagaccttcataaattctaggatggtgaattctcctttattttgtgtgtcgtgtgcaagtggacatgtgtgtatttactaaactctgtggacctggaaatacattctgatatgactatcaac

SEQ ID NO: 12593 - DNA, 464 bp, Homo sapiens
tacacctataatcctagcattttgggagaccaagatagggggctcacttaacgccaagattcgagaccagcctgaccaacatagtgaaaccccatgtctactaaaaatataaaaattagctgggtgtggtggcacgcgcctgtaatcccagctacttggaaggctgaggcaagagaatcgcttgaacccgggaggcataggttgcagtgagccaagatcgcaccactgcactccagcatgggtgacaaagcgagactccatctaaaacaaaagaaaagaaatagaaatttgatagtataaaaatctaagtattcctttggtagcagatagatcttaatgccatgttggtgagacattgggaattagagtttatttttaggctgggcatggtggctcattcctgtaatcccagcactttgggaggctgaggcgggtggatcacctgacgtcaggagttggagacc

SEQ ID NO: 12594 - DNA, 511 bp, Homo sapiens
gtgagcctagatcacgccattgcactccagcctgggtggcagattaagacttcatctcaaaaaaataaataaataggccgggcgcggtggttcacgcctgtaatgccagcactttgggaggccaaggcaggtggatcacctgaggtcaggagttcaaaaccagcctgaccaacatggagaaaccccatctctactaaaactacaaaattagctgggcatggaggcgcatgcctgtaaccccagctactcaggaggctgagacaggagaatcgcttgaacccgggaggtgaggctgcagtgagccaagatggtgccattgcactccagtctgggcaacaagagtgaaactccatctcaaaaaataaattaattaatttcattaaattaaataaatagttttaaccaattatatgttgaagtgatcatacattgtgtatactggctttagaaatatattaccaaagttaggctgggcacggtggctcaggcctgtaatcccagcactttggga

SEQ ID NO: 12595 - DNA, 516 bp, Homo sapiens
gaacctccatttttactcttgacagggcactgcaaacataaacattagagctaaagactgtatgtataaaaatctcagctgggcacagtggctcacatctgtaatcccagcactttgggaggccaaggcaggcggatcacctgaggtcaggagtcggagaccagccaggccaacatggcgaaaccctgtctctactaaaaatacaaaaaaattagctaggtgtggtggcaggcgcctgtaatcccagctgaggcaaaagaattgcttgaacccagaggcagaggttgcagtgagccgagaacacgccattgcactccagcctgggtgacaagagtgaaactccatctcaaaaaacaaaaaacgagaacaacaacaacaacaaatctctgagtgttttctctgcatatttgttaatgtaaaaattgtatttggaatctctgcattagaattctgaaatttcagtaataaaatcagcgatttctttgaatggcatatattggctatttatcagggaat

SEQ ID NO: 12596 - DNA, 516 bp, Homo sapiens; identical to SEQ ID NO: 12595

SEQ ID NO: 12597 - DNA, 356 bp, Homo sapiens
ctgttttgtaaggggacattttgtaggttctagggtgttgggtatggtgctggcatttagttatcttcatcagagatcaggtatccacatagctacactagacggcgttggatctatctgccatcttgtcaaggcagcagagttgtgttaagaaaacatttttggagtcagatgtgtttcaaattccaactattattccctgcatccatttctctcattttaagataggagcttatattgtttacctaacagtgtatatggtataaaaattaatagtttaagtgcattggacgtattattatatacataataaattctctgcaactactactatcttccctttcctggtggatcat

SEQ ID NO: 12598 - DNA, 332 bp, Homo sapiens
gggctaccccggctactcctgctcagcatggctgctttagtgactgttctcttcagtgagtggcaggtgtccggaggctgcactgcagcgcagccgcttgggcgggcggccagtggcgactacagcagggactggctgccaacccctccggctacgggccccttaccgagctcccagactggtcatatgcggatggccgccctgctcccccaatgaaaggccagcttcgaagaaaagctgaaagggagacgtttgcaagacgagttgtactgctgtcacaggaaatggacgctggattacaagcatggcagctcaggcagcagaagttgcag

SEQ ID NO: 12599 - DNA, 360 bp, Homo sapiens
  misc_feature 72, 218, 360: n = A,T,C or G
gaggggactccgggaggaggaacatggcggtggcggacctcgctctcattcctgatgtggacatcgactccnacggcgtcttcaagtatgtgctgatccgagtccactcggctccccgctccggggctccggctgcagagagcaaggagatcgtgcgcggctacaagtgggctgagtaccatgcggacatctacgacaaagtgtcgggcgacatgtanaagcaaggctgcgactgtgagtgtctgggcggcgggcgcatctcccaccagagtcaggacaagaagattcacgtgtacggctattccatggcctatggtcctgcccagcacgccatttcaactgagaaaatcaaagccaagn

SEQ ID NO: 12600 - DNA, 140 bp, Homo sapiens
acagaagtgaattcttccaaatttatgaaaatgaacacttagctaaaatgtgttcactgggttatgacaagtaactgggcttctagggaatgggatggcaggtggggtgctatcagtttataaaattttttgtaacctcg

SEQ ID NO: 12601 - DNA, 382 bp, Homo sapiens
ccgggtagctgggattacaggtgcgtgccaccacgcccggctaattctttgtatttttagtagaggctgggtttcaccatgttagccaggatggtctctatctcctgaccttgtgatccacccgcctcggcctcccaaagtgctgggattacaggtgtgagctacggtgcccagcctaattttcatatttttagtagagacggggtttcaccacgtagttcaggctggtctcgaactcctgacctcgtgatctgcccacctcgtcctcccaaaatactgggattacaggggtgagtcaccacgcctggcaagaaaactttttaatggtcctaggggcaagtataaattttctaggacctagaagacaacgctgtcattgctt

SEQ ID NO: 12602 - DNA, 804 bp, Homo sapiens; identical to SEQ ID NO: 2885

SEQ ID NO: 12603 - DNA, 658 bp, Homo sapiens
  misc_feature 569, 592, 593: n = A,T,C or G
gaggaagggtgagggaaaaatctcaacagaagcaagtttggggaaaatctggagtccccagtaaaaagcaggaaggtctctgctgtactcatcacagaatgggagagagggctctcaatagatcattccctttgtttctcccctgggcttcttgagcttctcgaagttcttcaggatgatgtcatataacacagcataagcattgcggatctccatgaccatcagccggatgtcccggtactctgcctcatccagctcgtgcaccagctgccgataatcacccacatggggctgcttggctgctttagtcactgcatcaccacgctcagagaaatacttagagatttgagtgtggaagccttctagcttggtgtggaggctggtcatcagctcaaacaccttctcctggacagccactccaaaattgttaccatcctcaatccgaggtatctgcagctgcaaccaggtggtgaccaggttgagctgctcaatgacatccttgatctcaggcttcaagcgctgcagaagggacacgatcttttcattgcaagtcactggggcacagggangaccctttgtctcaatctcaccnntcttctttcatcctggcttcatctcctgctggttcttcagtcctcttctcttcatcttgactggg

SEQ ID NO: 12604 - DNA, 478 bp, Homo sapiens; identical to SEQ ID NO: 1126

SEQ ID NO: 12605 - DNA, 529 bp, Homo sapiens
gacgctcggtaccaggcgcagatcatggcaggcagccggctggaaaccgtagggagcatcttctctcggactcgggacctggttcgggccggggtgctgaaggagaagcccctgtggtttgacgtatatgacgcctttcccccgctgagggagcccgtcttccaaaggcctcgagtgcgatatggcaaagccaaagctcccatccaagacatctggtaccacgaggatcggattagagcgaagttttattcagtgtatgggtctggtcaaagagcttttgatctattcaatccaaacttcaagtctacctgtcaacggtttgtggagaagtacactgagctacagaaacttggagaaacagatgaagagaagttatttgtggaaacagggaaggctttattggcagaaggtgtcattttaagacgagtaggcgaagcaaggactcaacacggaggtagtcacgtttcccggaaatccgaacacttgagtgtcagaccacagactgcgttggaagaaaacgagactcaga

SEQ ID NO: 12606 - DNA, 483 bp, Homo sapiens
acagaaggggtgctgcatgtttaaagtattccctctgttttacttcatgatagttggcccctttcaggttataacacggacatttttctatggttttcattatttgcacatgccaacagagtagaatagatttttaacgagcatcacttcattgcaagcaaatttattaatccagtggtactgatgaaactaaggagctctttggggtcaggctcgatggctcacgcctgtaattcttgcactttgggaggctgaggcgggtggatcacaaggtcaggagttcaagaccagcctggccaagatggtgaaaccctgtctttactaaaaatacaaaaaaattagccgggcatggtggcgggtgcctgtaatctcagctactcgggaggctgaggcagagaattgcttgaaccgagggggaggcggaggttgcagtaaaccaagatcgcaccactgcactccagcctaggtgatagagcgagactc

SEQ ID NO: 12607 - DNA, 613 bp, Homo sapiens
aggacctgtcccaaagaaaaagctctttttttagccagcatatttccccttctacccttttactttgttgttctgattttaggactctggctggccatgtgcttgtggttgcctctcctgcatttgccactggatttgcactgcatcgtttggagatacaaagcgagcagttcttggtcagaaccctcctctgcttttcattgtgtttgataatggttactgggtccttctctcaagggtagcaaggccaagctgatggctgcttgtttaggaggccatcagttccttcctgtggagaagggtctgaaatggaagtcagtggtagaaggggctggtctgctgggcagggcttacatccactgagttctaagattcctttcctgatctgcacctacgcctggtctgtatggtggaatttgtcagctggaactcagaaacaacaacttgaaaaaaaaataataattagaacatatttgcataagatagctatttactctggaaaccaacaacttttgagatttcccttgccctgtggacgcccagctcctgtcatccttccttaggtcctgcagtacagtcttcccctgaatgccaccggggacccagggggact

SEQ ID NO: 12608 - DNA, 515 bp, Homo sapiens
tttttttttttttttttttttttttaccattctcttttagtctatgggaattacagggttgccgctaaaatattcacttgttcatatcgtgtcagagatttcctcttctctggagcttaggtggctcttcacaatccataggcttgaatctgcaacctagtgtaaactgccttgctttccccggttctttcccctgctagcacctgctttctcatccctatctccagtcaaagatgggattacttaatccaactctggagagggaccaagtcttttctgcccacatctcacacaattgaggtgtctgaacaagcttggggagggtctataaggggtaggctcaaaaaaaaaaaaacccatctgcagagggcagttttgccaacacaagggctctttcaagccgactttcacaaagagagccggacttgttagttggcttctgtctctttagagccaagaaaatagtaattaagtggcctagatataggaagggcagaataagcacttactccccc

SEQ ID NO: 12609 - DNA, 591 bp, Homo sapiens
cacggggctgctgtaaggccgaggttgcggcgggagcggagaccatgttccgagcggcggctccggggcagctccggcgggcggcctcattgctacgatttcagagtaccctggtaatagctgagcatgcaaatgattccctagcacccattactttaaataccattactgcagccacacgccttggaggtgaagtgtcctgcttagtagctggaaccaaatgtgacaaggtggcacaagatctctgtaaagtagcaggcatagcaaaagttctggtggctcagcatgatgtgtacaaaggcctacttccagaggaactgacaccattgattttggcaactcagaagcagttcaattacacacacatctgtgctggagcatctgccttcggaaagaaccttttgcccagagtagcagctaaacttgaggttgccccgatttctgacatcattgcaatcaagtcacctgacacatttgtgagaactatttatgcaggaaatgctctatgtacagtgaagtgtgatgagaaagtgaaagtgttttctgtccgtggaacatcctttgatgctgcagcaacaagtggcggtagtg

SEQ ID NO: 12610 - DNA, 485 bp, Homo sapiens
taagatttgccgagttccctttactttttttaacctttccttatgagcatgcctgtgttgggttgacagtgagggtaataatgatgttgaaagttgatgaacagtgtggtatccctactcttgatcctggaaccagacaagcaagaagctttgattgaaagcctatgtgaaaagctggtcaaatttcgcgaaggtgaacgcccgtctctgagactgcagttgttaagcaaccttttccacgggatggataagaatactcctgtaagatacacagtgtattgcagccttattaaagtggcagcatcttgtggggccatccagtacatcccaactgagctggatcaagttagaaaatggatttctgactggaatctcaccactgaaaaaaagcacacccttttaagactactttatgaggcacttgtggattgtaagaagagtgatgctgcttcaaaagtcatggtggaattgctcggaagttacac

SEQ ID NO: 12611 - DNA, 177 bp, Homo sapiens
gcgtgtgcactgtggaacagagctgagaccccggccccccttggactggcacagggtcctacagagtcagaggaggcctgagatttcgaatgggcagtgaatggcctcttctgccagccacaggcaggatgctccttgatcacggcatcccccggcggtagtacagggtgagcttgc

SEQ ID NO: 12612 - DNA, 466 bp, Homo sapiens
tcttttccgtggcgcctcggaggcgttcagctgcttcaagatgaagctgaacatctccttcccagccactggctgccagaaactcattgaagtggacgatgaacgcaaacttcgtactttctatgagaagcgtatggccacagaagttgctgctgacgctctgggtgaagaatggaagggttatgtggtccgaatcagtggtgggaacgacaaacaaggtttccccatgaagcagggtgtcttgacccatggccgtgtccgcctgctactgagtaaggggcattcctgttacagaccaaggagaactggagaaagaaagagaaaatcagttcgtggatgcattgtggatgcaaatctgagcgttctcaacttggttattgtaaaaaaaggagagaaggatattcctggactgactgatactacagtgcctcgccgcctgggccccaaaagagctagcagaatccgc

SEQ ID NO: 12613 - DNA, 519 bp, Homo sapiens
ctcttttaataaacaaaaccatccaaggtacagttccaaagtacaaaatcaaccaggtctgaactgattggtgataagagcacacagatcagtccttccttaaggaaacagtttcctccctgatgccctctttggtcactatgcagatccggagtgcgtccccagtgtacacatctctctcagccgcagaaatgaagacatctttcaccagccgcatggctctgtccaaggacagcggaacatgctccacattctgcatgttcttaaaaccaacctggttgtcaagcaggggctgtagcatggcacttgctgagcctccagccttgaaggagtctctctggtaagaccctactggatcaaagctgtatacagccccctttccttcttcatcaagtccaccgatgatgttgtaaacatagtatggaaagaagcgccttgaatacaggattgtagacagcattgcagcaattgcccccgtagtcatggccttattattggaatgcttatacatctttagtc

SEQ ID NO: 12614 - DNA, 404 bp, Homo sapiens
ttttttttttttttttttttttttccgacagggtagctgggattacaggcacctatcattcattctgcccagctaatatatattttttttttctgagacatgttggctaggctggtcttaaactcctgacctcaggtgatctgccaacctcggcctctcaaagtgctgggattacaggcatgagccaccgcccatggcctttgtctaatatttaaccagaggaatagtcccccaaccaaaagcaggagagaaaactggctttggacttgctagcaggtagtatctgtcctcaatgatgtaccaacataaagcatttttcataagtggttctggatgccctttcttggaattcacaccctcagattgagttgagattaaaatttaaagaacaagtaagcaaaata

SEQ ID NO: 12615 - DNA, 497 bp, Homo sapiens
ctcttccggggacgttgtctgcaggcactcagaatggtccagcgtttgacataccgacgtaggctttcctacaatacagcctctaacaaaactaggctgtcccgaacccctggtaatagaattgtttacctttataccaagaaggttgggaaagcaccaaaatctgcatgtggtgtgtgcccaggcagacttcgaggggttcgtgctgtaagacctaaagttcttatgagattgtccaaaacaaagaaacatgtcagcagggcctgtggtggttccatgtgtgctaaatgtgttcgtgacaggatcaagcgtgctttccttatcgaggagctgaaaatcgttgtgaaagtgttgaaggcacaagcacagagtcagaaagctaaataaaaaaatgaaacttttttgagtaataaaaatgaaaagacgctgtccaatagaaaaagttggtgtgctggagctacctcacctcagcttgagagagccagttgtgtgcatct

SEQ ID NO: 12616 - DNA, 473 bp, Homo sapiens
tacggccgggtattttgtgctatggatgtgagtacggcaaagagactgaattaagctgttttgtatttggaatcggattgttcacgttgcaacgttgctgcaatgataaatggatggatactctttacactttgaagtggatttaatcttcactttaagccccttcatctcacctacacagcaggagagctttggctttgatatttggggaaatggctgttattttacttacagatcacgctattctagtcttggcctagttaaaagcaaatgagtactttagtttctacaagatttattggccactacttggtctgcacaaaagactataacacttggccggacgcggtggctcacgcctgtaatcctaccactttgggaggccgaggcgggcgaattgcctgagatcaggagttcgggaccagcttgggcaacatggtgaaaccctgtctctactaaaaatacaaaaaatt

SEQ ID NO: 12617 - DNA, 632 bp, Homo sapiens; identical to SEQ ID NO: 1166

SEQ ID NO: 12618 - DNA, 591 bp, Homo sapiens
tgccaaggcctgcgtagtacacggcagtgatctaaaggacatgacctccgagcagctggatgacattttgaagtaccacactgagatagtgtttgccaggacctcccctcagcagaagctcatcattgtggaaggctgccaaagacagggtgctatcgtggctgtgactggtgacggtgtgaatgactctccagctttgaagaaagcagacattggggttgctatggggattgctggctcagatgtgtccaagcaagctgctgacatgattcttctggatgacaactttgcctcgattgtgactggagtagaggaaggtcgtctgatctttgataacttgaagaaatccattgcttataccttaaccagtaacattcccgagatcaccccgttcctgatatttattattgcaaacattccactaccactggggactgtcaccatcctctgcattgacttgggcactgacatggttcctgccatctccctggcttatgagcaggctgagagtgacatcatgaagagacagcccagaaatcccaaaacagacaaacttgtgaatgagcggctgatcagcatggcctatgggca

SEQ ID NO: 12619 - DNA, 614 bp, Homo sapiens
actggcgctgtgcgcgctccatgcacgagttttccgccaaggacatcgacgggcacatggttaacctggacaagtaccggggcttcgtgtgcatcgtcaccaacgtggcctcccagtgaggcaagaccgaagtaaactacactcagctcgtcgacctgcacgcccgatacgctgagtgtggtttgcggatcctggccttcccgtgtaaccagttcgggaagcaggagccagggagtaacgaagagatcaaagagttcgccgcgggctacaacgtcaaattcgatatgttcagcaagatctgcgtgaacggggacgacgcccacccgctgtggaagtggatgaagatccaacccaagggcaagggcatcctgggaaatgccatcaagtggaacttcaccaagttcctcatcgacaagaacggctgcgtggtgaagcgttacggacccatggaggagcccctggtgatagagaaggacctgccccactatttctagctccacaagtgtgtggccccgcccgagcccctgcccacgccctcggagccttccaccggcactcatgacggcctgcctgcaacctgctggtggggcagacccgaaatccagcgtgcaccc

SEQ ID NO: 12620 - DNA, 543 bp, Homo sapiens
tgctcgacttggacgaggagcttcgctacagcttggctacctccagggccaagatgggtcgccgagctcaacaggagtcagcgcaggccgagaatcacctcaatggcaagaattcctctttgactctgactggagagacttcctctgctaaattacctcgctgccgacagggaggctgggcaggtgattccgtgaaggcttcgaagtttaggaggaaggcttctgaagaaatagaagatttccgcctcagaccacagagcctgaatggatcagattatggaggagatattcctatcattccggatctggaggaagtacaggaagaagactttgttttgcaggtggcagcccctcccagcatccagataaagcgggtgatgacctaccgtgacctggacaatgacctcatgaagtactcagccattcagacactggatggggagatcgacctgaaactcctcaccaaagtgctcgcgccggagcacgaagtccgggagcgaaacccttcttgcaggatgatgtcggctgggactgggatcatct

SEQ ID NO: 12621 - DNA, 408 bp, Homo sapiens
ttatcttgaagttggcttcgcgcttagatgctttcagcgcttatccattccgtacatagctaccgggccatgcccttggcagaacaactggtacaccagaggtacctccatcccggtcctctcgtactaaggacaggtctcctcaaatttcctacccctgcgacggatagggaccgaactgtctcacgacgttctgaacccagctcgcgtaccactttaatgggcgaacagcccaacccttgggacctactacagccccaggatgtgatgagccgacatcgaggtgccaaacctccccgtccatgtggactcttgggggagataagcctgttatccccagggtagcttttatccgttgagcgatggcccttccatgcggaaccaccggatcactaagtccgactttcg

SEQ ID NO: 12622 - DNA, 230 bp, Homo sapiens
tttttttttttttttttggcctatttcagatttattaaaaaacacataggtaacgagtcagagctttggctaggaatgatttggaaaagaactgaaggcatagttccacaggacattcacagttgtgtgctagagacagagaggagcaggaaagtgttttagaagcatttgcggtggacaatggaaggcccggcttcatcgtattcctgtttgctgatccacatctgctg

SEQ ID NO: 12623 - DNA, 497 bp, Homo sapiens; identical to SEQ ID NO: 1193

SEQ ID NO: 12624 - DNA, 534 bp, Homo sapiens; identical to SEQ ID NO: 1206

SEQ ID NO: 12625 - DNA, 531 bp, Homo sapiens
agaccaaccgcctgcaggaggctctgaacctcttcaagagcatctggaacaacagatggctgcgcaccatctctgtgatcctgttcctcaacaagcaagatctgctcgctgagaaagtccttactgggaaatcgaagattgaggactactttccagaatttgctcgctacactactcctgaggatgctactcccgagcccggagaggacccacgcgtgacccgggccaagtacttcattcgagatgagtttctgaggatcagcactgccagtggagatgggcgtcactactgctaccctcgtttcacctgcgctgtggacactgagaacatccgccgtgtgttcaacgactgccgtgacatcattcagcgcatgcaccttcgtcagtacgagctgctctaagaagggaacccccaaatttaattaaagccttaagcacaattaattaaaagtgaaacgtaattgtacaagcagttaatcacccaccatagggcatgattaacaaagcaacctttcccttcccccgagtgat

SEQ ID NO: 12626 - DNA, 581 bp, Homo sapiens; identical to SEQ ID NO: 2790

SEQ ID NO: 12627 - DNA, 566 bp, Homo sapiens
aggtgaacaagaaggaggtggtggaggctgtgaccattgtagagacaccacccatggtggttgtgggcattgtgggctacgtggaaacccctcgaggcctccggaccttcaagactgtctttgctgagcacatcagtgatgaatgcaagaggcgtttctataagaattggcataaatctaagaagaaggcctttaccaagtactgcaagaaatggcaggatgaggatggcaagaagcagctggagaaggacttcagcagcatgaagaagtactgccaagtcatccgtgtcattgcccacacccagatgcgcctgcttcctctgcgcctgaagaaggcccacctgatggagatccaggtgaacggaggcactgtggccgagaagctggactgggcccgcgagaggcttgagcagcaggtacctgtgaaccaagtgtttgggcaggatgagatgatcgacgtcatcggggtgaccaagggcaaaggctacaaaggggtcaccagtcgttggcacaccaagaagctgccccgcaagacccaccgaggcctgcgcaaggtggcctgtatt

SEQ ID NO: 12628 - DNA, 624 bp, Homo sapiens; identical to SEQ ID NO: 1224

SEQ ID NO: 12629 - DNA, 303 bp, Homo sapiens
ctggtgcctggaaatatttaccagtcaaggtcaaggtcaccatctgtggttaaaaatatagcattctgacctaaaaaagttattttgcagatgaatgtgttttcaactcaggacctatccaaatgaggaatttttaaatattcttttttttttcctatttttaaacatcaattctataaattctgactttttctaaccttttataggcttgccaaatgctggcaaaaaaaagtgctttttggatatggcagcacttgtaaaaataaagcagtaagcaaaatccttttaaacacaaaaatcctg

SEQ ID NO: 12630 - DNA, 628 bp, Homo sapiens
ggttacctcaaagaaattggaattaatgaagatcaatttcaagaagcatgcacgggtcctcttgcaaagacccatacatcacaggccattttgcaacctgtgttggcagcagaagattttactatctttaaagcaatgatggtccagaaaaacattgaaatgcagctgcaagccattcgaataattcaagagagaaatggtgtattacctgactgcttaaccgatggctctgatgtggtcagtgaccttgaacacgaagagatgaaaatcctgagggaagttcttagaaaatcaaaggaggaatatgaccaggaagaagaaaggaagaggaaaaaacagttatcagaggctaaaacagaagagcccacagtgcattccagtgaagctgcaataatgaataattcccaaggggatggtgaacattttgcacacccaccctcggaagttaaaatgcattttgctaatcagtcaatagaacctttgggaagaaaagtggaaaggtctgaaacttcctccctcccacaaaaaggcctgaagattcctggcttagagcatgcgagcattgaaggaccaatagcaaacttatcagtacttggaacagaagaacttcggcaacgagaacactatc

SEQ ID NO: 12631 - DNA, 530 bp, Homo sapiens
agtacatttcttacgctccgttaacacagagacaccaaaaacctggagggagttctgaagcaaataacaaggactattaaaagacttgaaggaatagtttataagggaaggattaagtcaaaggggaatgccatggcaatgggtagaaaacagtacaaaatatcctacaaagtaaaacaatgaggaaggggcaggaatgacttggggagaggaaacaaaaaaaccccaacaatgaagtaacttaaagtgcagaaaaaaaaaaattaaaactaattaagcagaaaaatgtaagccaaatggaggagtttgttgccacaaaataagtagtagtggggaaaaaaatatgtaacctccgaagagatattttcaagtgcacaagtgcaaaactctagtgcaagatttccttacactgcaggatggaaaatcatttacaaaaaacagggccaaaaaaatactgctaatggggatgctaataacaatattagttgtaggagcacttaacaagccgttgttttgtgccaggcactgtt

SEQ ID NO: 12632 - DNA, 249 bp, Homo sapiens
tacggccgggcgtggtggtgggtgcctataatcccagctacttgggaggctgaggcagagaactgtttgaacctgggaggcagaggttgcagtgagccgagatcatgccactgcactccagcctgggcgacagaccaagaccccatctcaaaaaaaaaaaaaaaaaaaaaaaaaatttttggggcccccgcgcctttttggggggttttttttggcccccccccttttaaaaaatttttggggggttgg

SEQ ID NO: 12633 - DNA, 502 bp, Homo sapiens
atgccattggccttatggagctcagagtctgatgtggcagacagatgatgcaaaagaaaaccaagagaaatcataattaaaggcaaagacaagccaggggtggtggtgtgcacctgtggtcccagctacttgggaggctgaggtgagaggaccactggagcccaggagtttgaaggtgctgtgcgctatgatcatgccattgcactccagcctggacaacagggcaagactttgtctctaaaaaaagaagaaagaaaaagagccaagacagatggaaaacagggtgcagtgatagaaaattcagaggcaaggatcggggagacatagagaagttaagcttcagtggtggccagacaaggcttctctgaggaatcgcatttagctgagctccaaagttgccacagaagggctgggggaggcgagtcccagcccagggcccccggcacgcaagcttggatgtttccatcactgtctggggcagtaaggatggagacaagcatct

SEQ ID NO: 12634 - DNA, 602 bp, Homo sapiens
tacggccgggcgcagtggcttatgcctgtaatcccagcactttgggaagttgaggcaggagaatggcttgaccccaggagtttgagaccactctgagcaacatagtgagacccaatctctacaaaaaataagaaaactagctgggtgttgtggcacactcctgtgatcccagctacttaggaggctgaggggggagggttgcttaagcccagggaggttgaggctgcagtgagccatgattgcaccactgcactccagcctgggctacagaatgagtccgtctccccaaaaaggatgaattggaggagagcagatgtaggtgccacctgaaggcattgaatggttgtagcaggagaacaaaggggtgaggccagaagcctgttggagtgaaggggagactctagaattcagaatagaaaggaagtcagggctgggcgcggtgactcacgcctgtagtcccagcgctttgggaggctgaggtgggcggatcacttgaagtcaggagttcgagaccagcctggccaacatggtgaaaccctgtctactaaaagtacaaaaattagccgggggtgctggcgtgcacatgtaattccagctgctcg

SEQ ID NO: 12635 - DNA, 548 bp, Homo sapiens
tacggccgggcgcggtggctcatgcctgtaatcccagtactttgggaggccagggtgggcagatcacttgaggccaggagttcaagaatcagcctggccaaaatagtgaaacccgcctcctaaaaatacaaaaattagtcaaatgcaacagagacgacaggaggttcccgtgatagaaccaaatatttgaaactaaaaaaaaacattctttctgtaaaagaaaaaaaaataacaccactccttcctgcaaaaatgttttacttaacactgggctccatctcttttttataattattcaatccaagctttgtcaaagcatcatactgagaagagattcatgttaaaaagctagtggaggggggtggagtaaatagcagagaatgcctctctgtcttatcatttttatttagattgacatacctttgattataattagggataactgttcagcagttaagactccataatcccatcattagttgtcaggagattttcacagggcaaactctcatgccatttctctcatttctggttcttaactacttggg

SEQ ID NO: 12636 - DNA, 546 bp, Homo sapiens
tttttttttttttttttttttttgtacaatatctttattaaagaaatgcattccagcaacactgtcagcatctttattaccaaagaaatacataactttaacagataatctctctgtatcttagtttttgcgctttgcaaaacaaatggagatatatcaactctcatacaattctaaaagcattgtgctgtgctgcctcacaggggtacgttcccagaggtttctctctctagagcaatccctaataggacaattgttcactctgaggcttctggcttcttatctctcctctcttggggagctgctgcttctctgtaggttgcttccctgtgacgcagggaccatagtttctgctctaataacaccttttccactctgacgtagctgagccatacactacattgccttagtcctgttcaccctttggtgattctgttccatttgccacctggcctcttcctcctcagtcacttttttcttttttttgagacagtctcgctgtcactgaggctggagtgcagtggtgcaatctcagctcactgcagt

SEQ ID NO: 12637 - DNA, 498 bp, Homo sapiens
agtgtcatgtcagcatgaccaggcctcctcggtcagattgactggttgccccctccttcctgccccaccaggtcagatggacaatcggagcaagctccggaacatcgtggagctgcgcctggcaggcctggacatcacagatgcctccctgcggctcatcatccgccacatgcccctgctctccaagctccacctcagttactgtaaccacgtcaccgaccagtctatcaacccgctcactgctgttggcaccaccacccgagactccttaaccgagatcaacctgtctggtgagtcaggggcccccatcgggtctgcctaacactccgtgggagaaccaggaggttcacatttgtggaaaacgattcgtgtgtctacagctatgtggtcacagtgctaggtgtctcgtttactgagacagacagcccagtccaggggggaaacacagtaaacaaagagttattgttggccgggtgcggtagctcacgcccgtaatcc

SEQ ID NO: 12638 - DNA, 528 bp, Homo sapiens
gtccggatgctgttgatggagtaatgaatggtgaatactaccagaaaagtaatggtccaacagacagttatgcagctatttcacaagtggatcgattgcagtcagagcctgaaagtatccgtaaatggagagaagaacaaatggaacgcttggaagcccttgatgccaattctcggaagcaagaagcagagtggaaagaaaaggcaataaaggagctagaagaatggtatgcaagacaggacgagcagctacagaaaacaaaagcaaacaacagggcagcagaagaagcctttgtaaatgacattgacgagtcgtccccaggcactgagtgggaacgggtggcccggctgtgtgactttaaccccaagtctagcaagcaggccaaagatgtctcccgcatgcgctcagtcctcatctccctcaagcaggccccgctggtgcactgaagagccaccctgtggaaacactacatctgcaatatcttaatcctactcagtgaagctcttcacagtcattggattaattatg

SEQ ID NO: 12639 - DNA, 579 bp, Homo sapiens
tttggcctgagatcatgctgggcccattcgggttgttaacatcgagggcgttgattccaacatgtgctgtgggacccatgtgagcaatctcagtgaccttcaggtcattaagattctgggcactgagaaggggaaaaagaacagaaccaacctgatatttctgtctgggaaccgggtgctgaagtggatggagagaagtcatggaactgaaaaagcactgactgctctgcttaagtgtggagcagaggatcatgtggaagcagtgaaaaagctccagaactccaccaagatcctgcagaagaataacctgaatctgctcagagacctggctgtgcacattgcccatagcctcaggaacagtccagactggggaggtgtggtcatattacacaggaaggagggtgattcagagttcatgaatatcattgccaatgagattgggtcagaggagaccctcctgttcttaactgtgggcgatgagaaaggtggtggactcttcttactggcagggccacctgcgtctgtggagaccctggggcccagggtggctgaggtcctggaaggcaaaggagcagggaa

SEQ ID NO: 12640 - DNA, 626 bp, Homo sapiens; identical to SEQ ID NO: 2785

SEQ ID NO: 12641 - DNA, 599 bp, Homo sapiens
ccgcagtccaagtcccggaagatcgcgatcctgggctaccggtctgtggggaaatcctcattgacgattcaatttgttgaaggccaatttgtggactcctacgatccaaccatagaaaacacttttacaaagttgatcacagtaaatggacaagaatatcatcttcaacttgtagacacagccgggcaagctgaatattctatctttcctcagacatactccatagatattaatggctatattcttgtgtattctgttacatcaatcaaaagttttgaagtgattaaagttatccatggcaaattgttggatatggtggggaaagtacaaatacctattatgttggttgggaataagaaagacctgcatatggaaagggtgatcagttatgaagaagggaaagctttggcagaatcttggaatgcagcttttttggaatcttctgctaaagaaaatcagactgctgtggatgtttttcgaaggataattttggaggcagaaaaaatggacggggcagcttcacaaggcaagtcttcatgctcggtgatgtgattctgctgcaaagcctgaggacactgggaatatattctacctgaaga

SEQ ID NO: 12642 - DNA, 641 bp, Homo sapiens; identical to SEQ ID NO: 1260

SEQ ID NO: 12643 - DNA, 469 bp, Homo sapiens
gagcataagaagaagcacccagatgcttcagtcaacttctcagagttttctaagaagtgctcagagaggtggaagaccatgtctgctaaagagaaaggaaaatttgaagatatggcaaaagcggacaaggcccgttatgaaagaaaaatgaaaacctatatccctcccaaaggggagacaaaaaagaagttcaaggatcccaatgcacccaagaggcctccttcggccttcttcctcttctgctctgagtatcgcccaaaaatcaaaggagaacatcctggcctgtccattggtgatgttgcgaagaaactgggagagatgtggaataacactgctgcagatgacaagcagccttatgaaaagaaggctgcgaagctgaaggaaaaatacgaaaaggatattgctgcatatcgagctaaaggaaagcctgatgcagcaaaaaagggagttgtcaaggctgaaaaaagca

SEQ ID NO: 12644 - DNA, 469 bp, Homo sapiens; identical to SEQ ID NO: 1274

SEQ ID NO: 12645 - DNA, 321 bp, Homo sapiens
acttgaggtcaggagttcgagaccagcctggccaacacggtgaaaccccatctcttctaaaaatacaaaaaataattagccaggtgtggcctcacgtgcctgtaatcccagctactcaggaggccgaggcaggagaatcacttgaatccgggaggcggaggttgcagtgagccaagatcgcaccactgcactccagcctgggcaacagagcaagattccatctcaaaaaaaaaaaaaaaaaaaaaaaaaaaattttttgggccccccccccccttttgggggctttttttttaccccccccccttaaaaaaacctttgggg

SEQ ID NO: 12646 - DNA, 630 bp, Homo sapiens
tccaaagtgcactacccatttgaaaggaagactgtagggtcagactgtctggatttgggtccagctccttcacttactaactgtgtggacccgggcacagatcagtttccttacctgtgtgagggaaaccctgtgcctcagtttccttatctctatattgaggttagtaatagtccttaccttagagaggctttttaaatattaaatgattgcgtatgtaaatgcttataatagtacccggcaaacaataagcaagcatttgcaatcatgatttgaggtaccccaacagcacaagacacactagggctaaaacgaacattcagaataaatgaccccaatggaaacagaaagaatttttttaaataagaaaactttcagaaactacaacttaatattactcaattagttttcacagaacattgaaaggatattgcaatcacaatagaagaatataaatagggccgggaccggtggctcacacctgcaatcccaggactttgggaggacgaggcaggaggatcgcttgagctcaggagttcaagaccagcctgagcaacacgatgagaccccctgtctctataaaataaattctttttaattagctggccatggtggcgcatgcctgtggtc

SEQ ID NO: 12647 - DNA, 600 bp, Homo sapiens
  misc_feature 503, 542: n = A,T,C or G
agtgtctattcttttattttactaaattaggaacgcagcatttacagaacaaataaacacaagtgacgtggccaccccaggatctaacagctcttcagtgagctatgttgcaagctcagaagtaatccactaacgaaccaagtcagactccagttcttcatcaaaaggtgctggtggaggttgtcagacgccttccaatatagatccccaatccgatggccagcaaatgagagagcagcagagatggaaggaaaactttcagaaattctgcagagaatatgccccctttcttcatgacgctcgtgttcctcatgctgagggtggccgtgcgcttcgggtgtttaaagaggaactccttggggggaatattttccggccgacttgaccaatcccatatccaatctgagtttttcttcaagatgctttcaacttctttccttctttcaatatcatcttcctcagactgtgagctgtttttctctccaatgctatgggtatctgtntcagaagctctgttggtatcttgtggtgtctgcagcgangtgggctgtcacagtgagagctcttggagctactccgtccagactcatgctgtgcgtc

SEQ ID NO: 12648 - DNA, 704 bp, Homo sapiens
acaaactgggagctgtttattggtcgccgtgagaagcctatatacaaagaaggcacaaggagggggagggaattcccctgctacagtaccatggaaggggctggggctggggagtgggcctgccaacaggcaggggtcaggagaggttttctggaactagcctcagcttctcaaatgggccttaggacacagcccatgggggagggggcagagccaggctggctctgaaagccaaggatagctaagaactccacctctaggccccctgacgcatggtcagcgtggggtctggctggatggggtggggcagggccccctgcctattctacattcaagtgtcgctccctccgtggtcttgcagggtctctctggggccttctgaggctggctggtagtggtgagtgagaagtggcatctcctctgtatcctcccaacatctgtctgtccagaattggtcccctcctctctgtggaggatcccgccgtgccccagcacagtgagcccaggctacgttgccgtttgcctgtctttgttccttcctgctgcactcccttggagttcagtctgtggccaaggagagaggcttcacagagatgcaggaaaagcaagccggtctgggtccttctttctagttcctttgctggtggtctgagcacggccggtcccttcagtgccccctagacaaccttaaggcagatccccac

SEQ ID NO: 12649 - DNA, 477 bp, Homo sapiens; identical to SEQ ID NO: 1280

SEQ ID NO: 12650 - DNA, 433 bp, Homo sapiens
tttttttttttttttttttttttggagttaattcttaccacagtcctttgacatcttattatctccattttacagataaagaaacaggcacagagggtttaagtaactttcacaaggtcacacaaccacaactagtaaagccagaattaaagtccagtcggtctgcattcaaagcctgtgctcctgccccaaagtgacaattagtgacttaaaggcaagaaaaacagacccttctctacccaccatcctcatacacagccttccagcccagaatctgaaccatttattcattttctctcatattcattcattcattcaattcttcatccacatttagtgaagctctgccgtggaatgttcacacagaaggtacaaaaatgaggcaggtgtattttctcccatctaacaggggatgaccacatgaaaagaactg

SEQ ID NO: 12651 - DNA, 506 bp, Homo sapiens
aattcaaataatttccaaatattgcattcatcacatcctcagggtaattatagcaattcaaaattatctcctgtgcacatgaacttcccagatcctgttgactcaggaactcaaatgggccatttcaatgatcatgtagaaactaatggcttttcatctttagaagagaatttacttcatcaagtggaatctcaaactgagccattcacaggacttgaccccgaggacctccttcaggagggtcttcttcctcactttgatgagtcaacattcggacaagataattcaagtcacattttagatcatgaccttgatcggcagtttacttcgcatctggtaacacggccttctgatatggctcagactcagttgcaaagtcaggctcggggttggcattcatcattttctaatcatcagcatttacatgacagaaatcacctatgtttacagcgacagcctccatcttccaagaagagcgatggttctgggacatatactaagttgca

SEQ ID NO: 12652 - DNA, 543 bp, Homo sapiens
ttttaatagtgtcaatttttgtaaaataaaaattaaacttcaaactctttactttataaattgtccgtaggccacactttaatatcacattataaagggaaggacagtcttcatttctcctggttattggtttgtttgtcattaaagatatattttgaatccgtgaaattgctatgctaaatagcctttacatgtatggtctggttaaagttcctttgttccttttgttttaataaaatgtgtcactgatttttgagctcaaaatcatcactgttaatttccagtcaccccaaatatggttaaaagattttttttttaatcatgaagagaaaattagtagcatttctttctctccccattatttcttggttttcctcactaatcttttttttttagtccaaaagccaaaaatatttatcttggttttacattttaatttccattcttaattgaaatttttttctttaaataaggaaaccaatataatctcatgtataaaaacttaaatattttacaagttacatatagcatcattctaaaata

SEQ ID NO: 12653 - DNA, 490 bp, Homo sapiens
gaagctgaagcagttcgatgcctaccccaagactttggaggacttccgggtcaagacctgcgggggcgccaccgtgaccattgtcagtggccttctcatgctgctactgttcctgtccgagctgcagtattacctcaccacggaggtgcatcctgagctctacgtggacaagtcgcggggagataaactgaagatcaacatcgatgtactttttccgcacatgccttgtgcctatctgagtattgatgccatggatgtggccggagaacagcagctggatgtggaacacaacctgttcaagcaacgactagataaaggtggcatccccgtgagctcagaggctgagcggcatgagcttgggaaagtcgaggtgacggtgtttgaccctgactccctggaccctgatcgctgtgagagctgctatggtgctgaggcagaagatatcaagtgctgtaacacctgtgaagatgtgcgggaggcatatcgccgt

SEQ ID NO: 12654 - DNA, 523 bp, Homo sapiens
gaaggtcatcgcaacgaaggttttgggaacagtaaaatggttcaatgtaaggaacggatatggtttcatcaacaggaatgacaccaaggaagatgtatttgtacaccagactgccataaagaagaataaccccaggaagtaccttcgcagtgtaggagatggagagactgtggagtttgatgttgttgaaggagaaaagggtgcggaggcagcaaatgttacaggtcctggtggtgttccagttcaaggcagtaaatatgcagcagaccgtaaccattatagacgctatccacgtcgtaggggtcctccacgcaattaccagcaaaattaccagaatagtgagagtggggaaaagaacgagggatcggagagtgctcccgaaggccaggcccaacaacgccggccctaccgcaggcgaaggttcccaccttactacatgcggagaccctatgggcgtcgaccacagtattccaaccctcctgtgcagggagaagtgatggagggtgctgacaaccagggtgca

SEQ ID NO: 12655 - DNA, 579 bp, Homo sapiens
tacggccgggactcctcatgactcaagttgtcatagtaaaagcttttttggttaagattaaaagaaatccactatattaggcaggagactcagcttgaggacaaataaaccttgaaatctcagtggccaaatgcaaaaagcttgatttctctctcacgtgaagccccagaagggtggcacagtcctcctcagcagctctccctccactgagattggggatctgggttgtgcattcctgagttcctcactcacagccacaggatgaggggggagtgcgtgaagcacagtcactgggtgttagctgcctgggactggaagtgacacatcccatcttctcatgtcattggggagtatccagttagctgggctcactctaatgacaaagtgcgatcttcctggaagttaagcttccagaccactttagacaaaatagaatcaggaagttacagggaggtccacatgagagtcagggcaagaaatccaggcagcctcccaggaccaggaataggcactggggagaattcagattcaaggaagttcctcttgggcatcacaggtcactcttctctactttgggtg

SEQ ID NO: 12656 - DNA, 529 bp, Homo sapiens
ccataccttggcaccttcctgaaggaccttgtgatgctggatgcagcctccaaggatgagttggagaatggatacatcaattttgacaagcgggggaaggagtttgcagtcctttctgagttgcgacggctccagaatgaatgtcgtggctataacctccaacctgaccatgatatccagaggtggctacaggggctccggccactgacagaggctcagagccatcgtgtatcctgtgaggtggagccacctggttccagtgaccctcctgccccacgggtgcttcggccaacattggtcatctctcagtggacagaggttttgggctctgttggggtccctaccccgcttgtgtcctgtgaccggcccactactgggggagatgaggcgcctacaactcctgctcctctgctgactcggctggcccagcacatgaagtggccatctgtctcgtcactagactctgccttggaaagcagtccatccctgcacagtccagctgaccccagccacctctccccaccagcct

SEQ ID NO: 12657 - DNA, 620 bp, Homo sapiens
taaatagagaactccagcttggacttcttgccataatcaactgagagacgttccatgagcagggaggtgaacccagaaccagttcccccaccaaagctgtggaaaaccaagaagccctggagacccgtgcactggtcggccagcttgcgaattcggtccaacacgaggtcaatgatctccttgccaatggtgtagtgccctcgggcatagttattggcagcatcttccttgcctgtgataagttgctcagggtggaagagctggcggtaggtgccagtgcgaacttcatcaatgactgtgggttccaagtctacaaacactgcccggggcacatgcttgccagcccccgtctcactgaagaaggtgttgaaggaatcatctcctcccccaatggtcttgtcacttggcatctggccatcgggctggatgccgtgttccaggcagtagagctcccagcaggcattgccaatctggacaccagcctggccaacgtggatggagatgcactcacgcatggttgctgcttcgcgactgccgagctgatggcggagacgaagaggagaggaatactaaagttaaaacgtcacaaaggtgctgcttttacagggaagcttattctg

SEQ ID NO: 12658 - DNA, 441 bp, Homo sapiens
tgagttgactcaaagtggagatttttagacccacaatgaatgtttatacagtagactaagcattggttcctgaacattgggcactgttgagttttaaggttaattattactgagactgattccaataggactcttaccaacacagtcaccagagagtacaatcttaaatacctccttttacctatgctttttactccaacatctgtataactataattcttattttatttgcagaacactttcatgtactttaaaacagacaaattgcatgtaataatatcagctgatggttatgaagcatgtattgtatgctaggcactgtgctatgtattttacatataatatttcatttaagtatcccagccccttttgacataggtgctagtacttttccttttcatgaatgaggaggccgaaggtcacagagacaataaatggcat

SEQ ID NO: 12659 - DNA, 503 bp, Homo sapiens
ccattcttccaggagaaggaatcggcattccaagtcaaaagtcaccaatggcgttggaaagaaatgaaaaaccctggttaatcaaagatgttccagagtgcctagaactgagagggaaatggaactcatttggaactccccgtgaggaggtcgaggcgcacagggcaagcaggaagaggcgagggcacttgggggtcattatttgagatcgtaagtcttgtttcccacagacctggccgcgtcaggcagatcatcgcctggggggcctttgccaacgtggggtctcttctaacttcagcacttgacatgcggtcaccggtggcagcgcggtgtgttgaagggaaacggtagctattcattcacagttgccaagagcagctccgcgcctgctggatcgtggatgcagcgtacacatcttccttcagacgaggcattaaccccatggttaatggactggtcaccagttattattttatttttatgaatctacctttccattgatt

SEQ ID NO: 12660 - DNA, 405 bp, Homo sapiens
aagattaagaggcatacatcacttagtaaactagtgaaagcctattgtgaacgacagggattgtcaatgaggcagatcagattccgatttgacgggcaaccaatcaatgaaacagacacacctgcacagttggaaatggaggatgaagatacaattgatgtgttccaacagcagacgggaggtgtctactgaaaagggaacctgcttctttactccagaactctgttctttaaagaccaagattacattctcaattagaaaactgcaatttggttccaccacatcctgactactaccgtatagttttctctattctttcatttcccccttccccattcctttattgtacataaagtaactggtatatgtgcacaagcatattgcatttttttttttttttaacta

SEQ ID NO: 12661 - DNA, 648 bp, Homo sapiens
cgttcgtcagcttgctcctttctgcccgtggacgccgccgaagaagcatcgttaaagtctctcttcaccctgccgtcatgtctaagtcagagtctcctaaagagcccgaacagctgaggaagctcttcattggagggttgagctttgaaacaactgatgagagcctgaggaaccattttgagcaatggggaacgctcacggactgtgtggtaatgagagatccaaacaccaagcgctccaggggctttgggtttgtcacatatgccactgtggaggaggtggatgcagctatgaatgcaaggccacacaaggtggatggaagagttgtggaaccaaagagagctgtctccagagaagattctcaaagaccaggtgcccacttaactgtgaaaaagatatttgttggtggcattaaagaagacactgaagaacatcacctaagagattattttgaacagtatggaaaaattgaagtgattgaaatcatgactgaccgaggcagtggcaagaaaaggggctttgcctttgtaacctttgacgaccatgactccgtggataagattgtcattcagaaataccatactgtgaatggccacaactgtgaagttagaaaagccctgtcaaagcaagagatggctagtgcttcat

SEQ ID NO: 12662 - DNA, 478 bp, Homo sapiens; identical to SEQ ID NO: 1315

SEQ ID NO: 12663 - DNA, 328 bp, Homo sapiens
ttccactgaatgcatctaagcaagatggacctatgccaaaaccacacagtgtttcacttaatgataccgaaacaaggaaactaatggaagagtgtaaaagacttcagggagaaatgatgaagctatcagaagaaaatcggcacctgagagatgaaggtttaaggctcagaaaggtagcacattcggataaacctggatcaacctcaactgcatccttcagagataatgtcaccagtcctcttccttcacttcttgttgtaattgcagccattttcattggattctttctagggaaattcatcttgtagagtgaagcatgcagagtgct

SEQ ID NO: 12664 - DNA, 524 bp, Homo sapiens; identical to SEQ ID NO: 1319

SEQ ID NO: 12665 - DNA, 576 bp, Homo sapiens
tgattcccagtattcactcacactgaaggctctgagaagtcctattgtaatcccttttaacatcccacaattaaagtccactttcagaaatgccaaagcaggcaaatgcctctctgtgttcattcatataaaatttcagggtccccagaaccagaggcggtgttttctgcggtattacacctgcctctggaggcaagtgcagtgtctgggatttactagacaataaaagaaggtcactgaataaattttcttgaaatcattatcgttcagtatttcactatctgatagacctcaatgtcagctgcaaaggttccacttttatatattttcctttagatatcctttatagtttcttttctagataatttacaaagatgatgaacgaagctgggagcccgttcctggggcatccttgctcttgttttgcttgtctttattcctactttactgaaagctagcattctatatacagcagcacttctccccaattccatggtgaatgccaacttacgatcttattttaatatagtttcaacattattcaaaattaatacatattccccatgtatgttcccc

SEQ ID NO: 12666 - DNA, 553 bp, Homo sapiens
tacggccgggtctacatacagggtgagtgaagacacggctgtgggcaggataatagatatcaagcacggtcccagagagactgtaggccaatcttggctataaagattgaggccagggaaaactggtctgtgtcatcacatccacccaaatggccatgctactgacacctgtggttcttttaactccagggaccatgtggtgtataaatagcagcaggtatggttagtttttatagacagttgtctttccaacctcattcttaacactctactaaactctctggtgacattctcattagggagtttcctgaggataatctcttccaggagtatccttttaaaaaattagatacctaattacatttcttttttgcatttttccatactctcctcgttttccagcggaggtgtgagaatctggctaggggacagagagtagcttggcttttgcaagtaatctgtatcagagagcatgtccattcctagtataaagggaggaaataggtatagtaggaggatggttactgggacgggacaggataaggaaatgggc

SEQ ID NO: 12667 - DNA, 265 bp, Homo sapiens; identical to SEQ ID NO: 1324

SEQ ID NO: 12668 - DNA, 564 bp, Homo sapiens
ggcctgggtgaacaagagccgcacgcgcttccgcatcccttggaagcacggcctacggcaggatgcacagcaggaggatttcggaatcttccaggcctgggccgaggccactggtgcatatgttcccgggagggataagccagacctgccaacctggaagaagaatttccgctctgccctcaaccgcaaagaagggttgcgtttagcagaggaccggagcaaggaccctcacgacctacataaaatctacgagtttgtgaactcaggagttggggacttttcccagccagacacctctccggacaccaatggtggaggcagtacttctgatacccaggaagacattctggatgagttactgggtaacatggtgttggccccactcccagatccgggacccccaagcctggctgtagcccctgagccctgccctcagcccctgcggagccccagcttggacaatcccactcccttcccaaacctggggccctctgaaaacccactgaagcggctgttggtgccgggggaagagtgggagttcgaggtgacagccttctaccgggg

SEQ ID NO: 12669 - DNA, 525 bp, Homo sapiens
tttttttttttttttttttttttttcctacaataaggtgtaatttataaattaggcctagtaacagattgacaacaacagttaacaataaaatagaacaattataacaatatagtgtaataaaaattgtgtggatgtggtccctccccctctctctctctcactctaaaaatatcttactgtactgtacccactatttttggacctcggctgaccatgggtaactgaaaccttggaaagggaagccatgcatggggtgggtggcgggggactactgtaattagctttttcaagagcttgctccaagccaggccctgtgctgagtgccctgcatgagttacccatgtaatcttccactggccctatgagtggatggatacctgtcagatctccacttttaagatgaagaaactaaggtccggagtagttcattcactttcttcagcaaggtcacacagaagtggtaacatgtacttgcctgaccccacggttttcagcatgcagaattcaggtttgggggaaatgg

SEQ ID NO: 12670 - DNA, 606 bp, Homo sapiens
ctttctttgcggaatcaccatggcggctgggaccctgtacacgtatcctgaaaactggagggccttcaaggctctcatcgctgctcagtacagcggggctcaagtccgcgtgctctccgcaccaccccacttccattttggccaaaccaaccgcacccctgaatttctccgcaaatttcctgccggcaaggtcccagcatttgagggtgatgatggattctgtgtgtttgagagcaacgccattgcctactatgtgagcaatgaggagctgcggggaagtactccagaggcagcagcccaggtggtgcagtgggtgagctttgctgattccgatatagtgcccccagccagtacctgggtgttccccaccttgggcatcatgcaccacaacaaacaggccactgagaatgcaaaggaggaagtgaggcgaattctggggctgctggatgcttacttgaagacgaagacttttctggtgggcgaacgagtgacattggctgacatcacagttgtctgcaccctgttgtggctctataagcaggttctggagccttctttccgccaggcctttcccaataccaaccgctggttcctcacctgcattaa

SEQ ID NO: 12671 - DNA, 633 bp, Homo sapiens
gagcccaactcactccagtgggtcggctcaccgtgtggcttgcacggaccttacattttctacaaggcttttcaattccaccttgaaggcaaaccaagaattttgtcccttggcgactttttctttgtaagatgtacgccaaaggatccgatttgcatagcggagctccagctgttgtgggaagagaggaccggccggcaacttttatccagctctaaactttatttcctcccagaagacactccccagggcagaaatagcgaccatggcgaggatgaagtcattgctgcttccgaaaaggtgattgtgaagcttgaagacctggtcaagtgggtacattctgatttctccaagtggagatgtggcttccacgctggaccagtgaaaattgaggccttgggaaggaatggacagaaggaagctctgctgaagtacaggcagtcaaccctaaacagtggactcaacttcaaagacgttctcaaggagaaggcagacctgggggaggacgaggaagaaacgaacgtgatagttctcagctacccccagtactgccggtaccgctcgatgctgaaacgcatccaggataagccatcttccattctaacggaccagtttgcattggccctggggggc

SEQ ID NO: 12672 - DNA, 587 bp, Homo sapiens
atttacagagtgaggagcagatgtggaatgtggactctatagataaagaccaagaggaaggttgtttcccagggcaaaggaacacagagagtaagggagtctggccttgaaagcagggaacaaaggacaaggaaagttcaacaagttaaccctttgaagaagaatgtcttactgtatttaacaggccatgatgttgccttctgtggcacctacaggcaggtgccccatgtttggggctgggggcagagtgactgccgagaaacatgctgtggaggatagcaccatggacatctctgggcttaggggaatgttctctctcctgattatgacatccatctatacacacatcaaaacacataaagctacacaaccaaagagccaattttactatatggtaatttaaaaaataaaagtatacagttatagtcctaaaatttaagagggaaagcccggcgtggtggctcatgcctgtgatcccagcactttgggaagccgaggcaagtggatcatgagatcagcagtttgagaccagcctgaccacacggtgaaaccccgtctcttctaaaaatacaaaaattagccgggca

SEQ ID NO: 12673 - DNA, 379 bp, Homo sapiens
tcaaggctgcagttagctatgatggcgccattgcataccagcttcagtgacagagcctgaccctgtctcaataaataaataaataacactgattttttatttgtctgagccactgcaaatgagaaatcagacatttaataaatcatgtattgatgggcatttaaagtgtttctaaaatacttcgttgtaaaaatcttactgagcctgtaatcccagcactttgagagaggccaatgtatgctgggcgcggtggctggcaagaggattgcttgagcccaagactttgagataaataaactgggcaacatagcgacataaacctctacaccaaaattttattttattttattttatttatttatttttgagactccatctc

SEQ ID NO: 12674 - DNA, 460 bp, Homo sapiens
ttggaattgggtttttacatcacatattgtttgattataaaaaagcaacaacacagccgggcgtggtggctcacgcctgtaatcccagcactttgggaggccgaggcaggcggatcacctgaggtcaggagtttgagaccagcctgaccaacatggtgaaaccccgtctgtactaaaaatacaaaaattagctggacgtggtggcgggcgcctgtaatccaagctactcgggaggctgaggcaggagaattgcttgaacccaggaggtggaggttgcagtgagccaagattgtgccattgcactccagcctgggcaacaggagtgaaattctttctcaaaacaacaaccacagcactatgcttgtgttggggcagaggataatgaaaaatctctgtacctcccactcaagtttgctgtgaaccttaaactgctctaaaaaaataaaacgtatcgaaacga

SEQ ID NO: 12675 - DNA, 571 bp, Homo sapiens
ttttttttttttttttttttttttgatgtttacaatttaataaatctcttcattgcagacatgtatggctgtttggtagtattcagaaacatcacagtaatggcagtttcttcaattggtgtgtagtcctcaataattatatatgaaattgctgtcaaaccagtaagactgcatttatacatccatcagtttcaggactgttggtaacctgggcatattttccccaaataactttgcctccttgtgtcacaaggcccaattcgctcacatttacttcaatgacagtacctttggtaataacacccaaagttgtatacagtggggatgagggattcttctttacaccaagtattggtaggcaaaaggtggctttcagttcaggatgtgttacatgggctttcttgaaacgcaagcccattggcctgatgaatctttcatatttaggtggttttcttgtaaagccatctccaacaaagcacactttagtaaccattctcttccatgccttcttctttctctttcctgttcgaataacttttaatacttctgtttctccctgggcacgtacttt

SEQ ID NO: 12676 - DNA, 512 bp, Homo sapiens
tttttttttttttttttttttttttcgaaatacataaaaacattttattcacaaaattggtcatcacagcattatttacaatactgaaaatctggaaatagcctaaatttctaacaattgaaagaaggttaagtaaattataagactacacaataaaatatattaccagcaatatatctttgtgaaaatctataataaccacacataatacttagtaaaaaagaacataaattacatgataaagaatatgatcagaacaatgcaaaaaattcacacccccaaaaaagacaagatattatatggcaattttgtggtaaaatattcatgtatttgtgcagcatttctattttttccgtaactgacacatcagttttataattaggaagaaaatacctttttaaagtaaagcgaacacaagattctttagcaatgttcattccatcccacaatagagtctagagagtcacaaaaacctcagcctccttcgggaggaggggagcttggttgtgaaa

SEQ ID NO: 12677 - DNA, 358 bp, Homo sapiens; identical to SEQ ID NO: 1371

SEQ ID NO: 12678 - DNA, 510 bp, Homo sapiens
atataagaaagatgggataacctggtacacaaatgttgcccagtatgtgcgcattgccagtggacttcattttgtaaaaatggaatagaggcagtaccccaccatgtgtactgttgagccggctgttgagaaacaacttggttcagccggtggttttgcttctcctttgtgttcctgtgagtaggctgtgccgatggcagcagcgccacgtggtatctgtgcgctggcgatgagaggagcgctttccatttggaggcagtgtgagcacacgctggagtgcagcgttccaaagtccgcccgaaatggatgctgcgtccacggccatcacctgtgcgggaacacctggtttccttaagacaatttcctttttgtccttttatatttttctaaagaaaactaagatataaactaccaagtgctcttaagaataaaaataagaataagaatacaaaggagcactactcttggctacacgaaagatcttgggattcatgacactgagggcaggga

SEQ ID NO: 12679 - DNA, 542 bp, Homo sapiens
tttttttttttttttttttttggatttttggtagagacaacatggggtttcacaatgttgcccaggctggtcttgaactcctgagctcaagtgatctgtgtgctttggcatcccaaagtgctgggattacaggtaatgagccaccgcgcctggccaaaaccatgtttttaaatgaaattttcctcccttatcttttgtattaccttggagtatcttgcattaacttgggatacttgtaatatcatttgtattaaccttgtgcaggatgtggctctttgcttgtggcagcccaatgggaagagtaagaagactccttgttgtggctcacaggctcctacatggccacctctctgacatcatctcctgtttttcttgccttctacttgctcttcttgctccgaggaacgtcgtcttctagatcttaatggctgtttcttcatgcgtaaggttttagctcagatggccttacttggtcatcctatccataataattcctttttctgataggaacattttcacctgcaagtaaatagaaaacttga

SEQ ID NO: 12680 - DNA, 513 bp, Homo sapiens
tttttttttttttttttttttttttggagttggttaaggttgaggcctgctttttgctttatttctgaatggtcattaattctttaggtcacctgccgatggtgaaggtgcctgaggtgcctggtgttactcagcactgctctgctgggtgggtggagcagggttctcagttggtgcttcacctgccttggcctctttgccatcttgtgaaggagcgttaggaggacgcgggcgacgccggtaattgtagggacgccggtatccacggcgaacagacggctggtttggaccactggtggcttgctgattttctttatcttcagcctctccaactgctggggcaggtcgtgggcgaggaggtcccctgctacggtaccttgggcggtaagttggatttcgatgaaccggtccctgaagttgtgctccctctgggactccatccttcatctctccaatctcaccagcctggagaggcaatgagagctgacagtgagtgtcacagcacaggggata

SEQ ID NO: 12681 - DNA, 565 bp, Homo sapiens
tttttttttttttttttttgggatatgacctttattgaacttatccaccagagtggaaataatgtctgtacaaaaccaaatgtttgttactataacttctgcatcacaattaaaatccaaacagttttttaaaaacagtcaactcaatcaaaacccactacttcagaatcaatagcttctttgaagccacagtaacacttaaatatggttaagactcgaatgcagaaatttggttggttggaaagctaattaaacttccaacttgctcaaatagaattacaaaaaggcaaaattgtgtttttcacagagatacagtccactggaatcaccaacactggacggctgttagagtatttagagtcctgagataacaaggaatccaggcatcctttagacagtcttctgttgtcctttcttcccaatcagagatttgtggatgtgtggaatgacaccaccaccagcaattgtagccttgatgagagaatccaattcttcatctccacgaatagcaagttgcaagtgacgaggggtaatacgctttacctttaagtctttcgatgcattt

SEQ ID NO: 12682 - DNA, 458 bp, Homo sapiens
tttttttttttttttttttttttcttaaataatgaaaatcaaactatgataaaagttaggaaacgtgcagaaccaccaggaaaacagcaatttgctttcagcgtacctttgcaaggatgttccaaagcctcatgtacgagtgagatttctgggccacttgcacaagtagataaaccctcttctcaggccagttataaagggctgagatgagccacagaagcccaagatctgctctgattgtctcctagctattttctttcctcttttttttttgagacagggtttcactctgtcacccaggctggagtatagagtacagtggcaatcatagctcactgcaagcttcaacctcccaggctcagatgatcctcccaactcagcctcctgggtagctgggaccccagccatgtgccactgcatctggctaattttttaatcttttgtacacatggggtttt

SEQ ID NO: 12683 - DNA, 336 bp, Homo sapiens
tggtggcaggtgcctttagttccagctactcgggaggctgagacaggagaatcgcttgaacccgggaggcagaggttgctgtgagccgagaccatgccactgcactccagcctgggtgacaagagcaaaacttcttctcaaaaaaaaaaaaaaaataagccgggaaatcaggggactttgggtcccaaaccttttggggggcctttggccaaatccccaccggggtccttggtttttccctttcccaaaaaaaaatgttcccggggttgggaaaaccattccggggaaattcctttgcgggaaaaaattttccccccattttttcccattttgacc

SEQ ID NO: 12684 - DNA, 628 bp, Homo sapiens
ccaggggccttcgaggtgccttaggccgcttgccttgctctcagaatcgctgccgccatggctagtcagtctcaggggattcagcagctgctgcaggccgagaagcgggcagccgagaaggtgtccgaggcccgcaaaagaaagaaccggaggctgaagcaggccaaagaagaagctcaggctgaaattgaacagtaccgcctgcagagggagaaagaattcaaggccaaggaagctgcggcattgggatcccgtggcagttgcagcactgaagtggagaaggagacccaggagaagatgaccatcctccagacatacttccggcagaacagggatgaagtcttggacaacctcttggcttttgtctgtgacattcggccagaaatccatgaaaactaccgcataaatggatagaagagagaagcacctgtgctgtggagtggcattttagatgccctcacgaatatgaggcttagcacagctctagttacattcttatgatatggcattaaattatttccatatattatataataggtccttccactttttggagagtagcaaatctagcttttttgtacagacttagaaattatctaaagatttcatctttttacctcatatttct

SEQ ID NO: 12685 - DNA, 643 bp, Homo sapiens
tacggccgggaacccatgtcttgctgatataatcggtcttatctctccagccagacgtgggttcccgtcctgaaagggccatccctcttgtccctctgtccttccagtgctttgacatttggtgggcacagagtagaacaatacaaagtactgaacaataactttggttttcttgccaattttattgcttggcaataaaattgtatacctaaggaaagaacgattttaattttttaactttagaactcaacaagcacttgtttggtattgatactttactttgtaagccttccacaagaaatcaaataatgtctcttgcgctgaaatcgtcaacgggttacacactctgcaaagttatgggaagcacagccctgaccttaataaatgccaaattgggtggtaatttaaaaggaaaaaaaatcttcacgtaagggttggtggaaattattatgcttccctctgcccccgccccccgccaataacagagtaattgaaccaggaactgagagtgtttagtaatttaatgaacattggtttactaaataaccagtttatatgtttgataatatagcacattttattattgaaaacatttcaaattagactttgactttcacttgttttattatggagaaaaggattt

SEQ ID NO: 12686 - DNA, 530 bp, Homo sapiens
tgtgctgggaacatgtaccactgagcctgagatggggatgagggcagagagaggggagccccctcttccactcagttgttcctactcagactgttgcactctaaacctagggaggttgaatattgttacccttaggttttaacactaatcctgacaccaccatctatagggtcccaacttggttattgtaggcaaccttccctctctccttggtgaagaacatcccaagccagaaagaagttaactacagtgttttcctttgcaccgatccccaccccaattcaatcccggaagggacttacttaggaaacccttctttactagatatcctggccccctgggcttgtgaacacctcctagccacatcactacagtacagtgagtgaccccagcctcctgcctaccccaagatgcccctccccaccctgaccgtgctaactgtgtgtacatatatattctacatatatgtatattaaaactgcactgccatgtctgccctttttgtggtgtctagcattaacttattgtct

SEQ ID NO: 12687 - DNA, 386 bp, Homo sapiens
aagccagctctgtgcctggaggggactcgccgccatctcaggtctcttggctttgccagggcccaccggagaaaactgacgacccgtttctgtaatccttatgggagaccaaccttgtgcctccgggagatccactctcccacctggaaacgcacgggaagccaagcctccaaaaaagcgctgcctcctcgctccgcgttgggattatccggaaggaactcccaacggaggtagtaccactctaccctccgcacctcctcctgcataagccggcctgaagtcgcaccctcctcctccggagaagtagggaaataaatttctcccaccctaaaccagtctttgagtgattgcagtatgactccatttccctggggcattcatataat

SEQ ID NO: 12688 - DNA, 551 bp, Homo sapiens
atagtaagatgtgaggccatctttgaaaaatgtcagctgtgtctagccccagggcattgggcgttccaaaagaaggaatacatttctttaaatgtatcattatttcggttcttagttttttctcaggagtttatgtctgtcttgtttctcctaccattctcattcattcattaattcagtcagtcattccctgagtacctaccattctgccaagtgccaggtatctctagaaatcataagataaatgttttcccttcagggagcacactgtgtagagtagtgatgaataagcagtccaatataaagtgacaaaaattattaatagaagcctggaggaagaaggatctaaccaacaggtagctggtggaagcaggtgaaggagaacactcttagaatgagttctacaggtctggaggaggcttatgggtgaacaaatggacaaaggtgtcaagtagaagaagggcagcgaggaagagggaacacaatgtgcaaggtcatggagctattaaagaactaaaagcctttttaataaataagtattttcttgaaaa

SEQ ID NO: 12689 - DNA, 354 bp, Homo sapiens
gtgataaataattactaccgttattaagcaattgcagtttgcagtgtgccaggcactgtgccaagtattttgcttcgatgacttcacgtcatcttcaaaacaacctcatgagggctgggtcagttagaacctaaacaaactagagacctggttgcaacccctcaggctctgctgatgctgtccccctttgttcctgcagcgtggaccctgccagcagccaggccatggagctctctgatgtcaccctcattgagggtgtgggtaatgaggtgacggtggtggcaggtgtggtggtgctgattctagccttggtcctagcttggctccctacctacgtagcagacagcggtagca

SEQ ID NO: 12690 - DNA, 652 bp, Homo sapiens
ccggggggggagctgcgtagctcccggccccgcggccatgcccaagcggagctgccccttcgcggacgtggccccgctacagctcaaggtccgcgtgagccagagggagttgagccgcggcgtgtgcgccgagcgctactcgcaggaggtcttcgagaagaccaagcgactcctgttcctcggggcccaggcctacctggaccacgtgtgggatgaaggctgtgccgtcgttcacctgccggagtccccaaagcctggccctacaggggccccgagggctgcacgtgggcagatgctgattggaccagacggccgcctaatcaggagccttgggcaggcctccgaagctgacccatctggggtagcgtccattgcctgttcctcatgcgtgcgagccgtggatgggaaggcggtctgcggtcagtgtgagcgagccctgtgcgggcagtgtgtgcgcacctgctggggctgcggctccgtggcctgtaccctgtgtggcctcgtggactgcagtgacatgtacgagaaagtgctgtgcaccagctgtgccatgttcgagacctgaggctggctcaagccggctgccttcaccgggagccacgccgtgcatggcagccttccctggacgagcgctcggtgttcacactgaact

SEQ ID NO: 12691 - DNA, 565 bp, Homo sapiens
attaaaggatgcttataatttggtaggaaacagccacatagaaactgagtttttagttagttagatacagtacctaaaggaagcactggttacacagagcaggaccaggtatttccttacagtcggcagctcggttctttagtaagaacctgtcccttttatacaggtgctagtgtcatatttcagcagcatgtatgctaacatgcaaagttgtttctgttcaagaaaatgctcacaaacattgagaggcagtgtgtagtggttaagaaaatggactggggccaacttgcttgaagttgagtctgggctgtatgacttattaactcagttactttgggcaagttacttaatctctctgtgtttcaatttccttatctaagaaatagggaatattataccctagacttcatagatatttgtgagcatttgatgagttcatgtatataaactttctagaatcggccaggtgtggtggctcatgcctgtaatcccggcactttgggaggcccgggcaggaggatcccttgaactcaagagtttgagaccaacgtgggtaacatgatga

SEQ ID NO: 12692 - DNA, 561 bp, Homo sapiens; identical to SEQ ID NO: 1394

SEQ ID NO: 12693 - DNA, 497 bp, Homo sapiens
tacggccgggcgtggtggcatgcggctgtgatcccagctacaagggaagccgaggcaggagaatcgtctgaacccgggaggcgcagtttgcagtaagccgacatcgcaccactgcactccagcctgggcgacagagcaagactctgtctcaaaaaaaaaaaaaaaaaaaaaaaaaaaaaaaaaaaaatttttttggggccccaaaatttcaaactttttttttaaaaatgaaaaaattcccaaattgaaaaatttttttttggccttttgtttttcctttccccattttttaaggaaaaaaaaaaaattttggttttccaaaaatttttttttgaaaaaaaataactttttttttttgggaaaaaaatttttccttttttaaaaaaaaccttccttttggcttttttaaggggtaaatttgcttttaaaacccaaaagaggttttttttttttaaaaattccctttttaaaacaatttttttaaaaaaaaaaaaggg

SEQ ID NO: 12694 - DNA, 534 bp, Homo sapiens
gtggtgcttgcctgtaatcccagttacttgggaggctgaggtaggcgaatcacttgaacccaggagatagaggttgcagtgagccgagatctcaccactggactccagcctggcgacagagtgagacttcatctcaaaaaaaaaaaaattttttttttttttttttttttgggtttcccagggggggggcttttttatattctttttttttttttttttttttccggacatttttttaccctttggggatttcttaaaccggggttttttttgggttttttttggtctttcaaaagagggccctttgggaaaattttggggcccttttttttttttgggtggatttgccctgcccttgtctttttgggatataccctttttaggggttttttgggctcccctttcaaaaaaactgttttaaaagatggtctcattttttttttttggacagggaaattaatttttttcccccagaaaaaaagcccttttattttttaatttccccccttatttaagggggggtgtttttttttt

SEQ ID NO: 12695 - DNA, 329 bp, Homo sapiens
tttaaatgctgggaatctatagtttgttccatgggagaccttttaaataatacagaagttttaaacagcaaaatttacttgacactgcaaattttaaaaactagtttatatccttttactaaatatttcccaatggaaacagcgttcacatttcacaagtttcacttgattactttcagattttgtatgagtataaagtgcattagttttacaaattatacaaaaaaaaactacccagggtacccatcttgctgattaaacttttttgaatttttatttatttatgtttataatatcaacttttattttagatttggggggtacatgtg

SEQ ID NO: 12696 - DNA, 550 bp, Homo sapiens
tgcatatgaagctgtcgctccttccgggccagctcgtagtatttcgcttgctcttctctggacagtgcatgccctaccctgcgcccttaggacccggactgaccgtgtacaaaactttacgtgccaaaattctcagtgaatttagctttctccctctttttgatgctgtaatttttgttcatcatgttttgctgtgatgttacataggtagatttgtatgtagttttaatgtcacctataacaaaatgtgtttggtagcagattgtccagaaagcattttaaatgaagaggtataaacccttaagggccaaaattctgtatattagattactcttaaacgaaaaaccagctgccgcttttatgtacacatattacatacgagtaggcagcagactttaaaaataaaaaaaacctaggcatgttgatgttgcaaaatgctgtataaagctgaaacctgttcattcagtgccattgtagttgacatgaagcgattgtaaaactgtctccgatttttctctggtttattaaaatgctaactataacatttttt

SEQ ID NO: 12697 - DNA, 417 bp, Homo sapiens
ttttggcctgttagcaactttttatacctaacattgtttgagctaagtaggaatcaaatctgacaaccagagagaaatgcttattttctacatattaaaattgattctttttcattctggagatggaaaagaaaagccctatatctaatttaatcaatgagaccttattagaaaatgggagatccaagattgcacaaagttcaaattaaagcaggcaactctgacatctagcaaaatatacgaatctcctcttgactctcgaaaacaaatcacattcctaaccaaaggctaaagtttggggtatttagggagctagggagtcctagagagagaattggacaggtctgaggagaaaaaggataatttaaatataaaaaagtggaaaaaatcggttttaagtcatagcatgtctttgag

SEQ ID NO: 12698 - DNA, 334 bp, Homo sapiens
  misc_feature 281: n = A,T,C or G
tacggccgggcatcaaaatctaactgccccatcctggagacattttgcagggctttcctttcaagtctttcaagtacaggatattaccacaacagcagctgaactgttgtaaccagcatgtttttcctatttccactgtgacctgcagctgactcaaagccttgcgtgacctgacccaggtgcaagagacaggggaagagggatagagggtatagcataaattacatattttcatggctttgggtggttcctccaaaaataattggacctgtaaaaactantgtgtgtgtgtgtgtgtgtgtgtgtgtgtgtgtgtggggttttttttttaaat

SEQ ID NO: 12699 - DNA, 583 bp, Homo sapiens
tacggccggctaattttttgtattttcaatagagactggctttcaccgtgttggccaggatgatcttgatctcctgacctcgtgatctgcccgcctcggcctcccaaagtgctgggattgcaggcgtaagccaccgcgcccagcctaacttttgtaaatagttttataagtagggtatttattttgtagattattgatatatgtagtccaatatgcaaacgatacagaggtatatctgatgaaaaactcgtctcccactgacatgcctcagacaacacccctcctggtggcaagtccattagccagtttttgggtgtccttgcagagatctgcgtggcatatgagaatagctatgcatgcatgtatcacataacatgtatatgcatttgaacaccatggtagtgtgtgcaaaccgctgttctacctctagtgttttttctttgtgttagaggtaattcagcatcagcacacattacacagcattgtcccatttctctataatcccatgctttccaagtgttaccttacgtctgtagtttacttgttagtcctccgcttgtgagtatgtagcatatgtaacagt

SEQ ID NO: 12700 - DNA, 646 bp, Homo sapiens
tattgcactgggtcacaaaatgcagtattagctcactgccatccttcccgaacatgctggctgccatctacaacacaacagagctggtgatgatgcaggactcctctccagactttgaggacacttggcgcttcctggaaaaccgggttaatgatgcaatgaacatgggccacaccgccaagcaggtaaagtccacaggagaggcactggtgcaaggactcatgggtgtagcagtgacgctcaagagcttgacaggtctaaaccagcgtcggtgagaggaaggggtataagctacaatgcctagaagagaatgagcggacagattgaaagagctttgaaaagtataaggtgccatccacataacctggtgttcacgagaacacactaaaggactcctgagtcactaccacagccacctggaaaccacaaggcatttgatgctaccgttctggtcagggattgggctgcttcttcagttcctaataccagaccaagcctcctgatgcctttctgcactgcaactgtgtgattgaaaaatgagatgttcatccaagcagtcaagccacagaaacccagcatgtccctgtcacgatctcatgggcaccttgatcatgtcttaaccttcccttaaaccttgggctcccag

SEQ ID NO: 12701 - DNA, 518 bp, Homo sapiens
tttttttttttttttttttccagtttggtattaactttattctattttctgtataactttaagtacataaaggtttatttccacaggcctcaggaaatgggtagaaatcacaggacaatctctcttcccaccaaaaaaaagttgtatattttggtaagtgtttgtcctagagggaaaaacaactgaaatttacattagcagtgctgtgcaagattcttacataattcaagacctaaaaccagcctgcagtggaggtttcagtcctctgttcaggtgcttagacagaagccataagctgatgagcatgacagggaaaaggaggcagtgaagacaggtgacaggcacctggcagggaagaaggattcaggaatgccagactccttgaaatcatgtgggtttgtttttttttttttttcttttaaagtcatctctataggaaggtgctgggcagggatcccagagaaagaaagggtccaagactccattaactgccctggatgaagggcactgctacagca

SEQ ID NO: 12702 - DNA, 507 bp, Homo sapiens
ttttttttttttttttttttttttttagagagggcagttttattgtctcagaagggcagggctgagggagggagctgaggagcaacatccccccaggccccaaggacacacacactctgtccttcccatgggccatggctctgggagcgacccacagaagggagaggaggctcaaactgcccccaggccccagggttctcaggtcagggagttagggaggaacatgaaagtgacacgcttcttagatacatcagcggctgtaaccacagggctgagggggcctccttgctctggagggggtcttcgtccatccttggtggggggggtgcccagccccttttcaggcctaacaacagtctctaagagggtcaggagaactgggcagccgctaggacagcgtactacaccccggacaggcaggtgagccacaggcttgtcacagaccacatacacacacacgcacacacacgcgcacacacacacacacacacacaaagagtgcaattg

SEQ ID NO: 12703 - DNA, 597 bp, Homo sapiens
tttttttttttttttttttttttttaggtaagctttcacaatttttattaaatcctagtctagttgagcaatatctgatgttacagacatcatcccatggtgaacatgtttaataagtgaaagcaagtcagacatctcatctaagtcattattttctgcagactaagcaataactacacagaacactatgggtaaacaaacacctgctcagttttcacacaagccatgttgtttatcaaattagatctgctaatattgaatacagtagattcggtgattgtagttctcatataagtatcttattgagataacattttgacagtttcactgactttccaaataagcacaccataatcaaagaaaagaataaagagtgaagtaaaaactgaacatgaagagattaagttattaaaggaaaatgaagtaaataaaaagagtgaaaaaccattgggggtggaagtcaaacaagcctagacatttgattggaagagaaaagatcaaatatgaagttcacaaatcaaaagtttataaactcaatgcaatactaatcctttttattgtaaaagctgagttgaaactaaaagatctataaaaact

SEQ ID NO: 12704 - DNA, 568 bp, Homo sapiens
ttttttttttttttttttttttttcagggaaggaaaatatcagacatagctttattgctgactcctgcccccttcagagcccatagtcacaggcctcagggctgttctgtaagtagagctctaggaaaccttgccagtctttctcactagtaagcagggctgagactgtgggatcttccttcatggctgccatccacagtttcagttttggagtgtggtctacacactcatttaacttcattgcttccagccgttcaaaccagggccagatgaggtaatcaatcatagagatagaattgccaccaaagaaggtcgtcttcttattagtcagaacctcctctagcttggtaaattctttacgaaattcttcttttaggccagcatagtcttctttattttggcttctaataaagcttcctaccaaggatggcaccttagaaaacaactctaagatcatcttctggcaagctttctcataggggtcatccggcaacagcttcttccctgggtatgcttcatccaggtactcacaggtgatggcagactcgtagatcagctgaccctgact

SEQ ID NO: 12705 - DNA, 609 bp, Homo sapiens
caactggtattaagtgttaataatggactatgtagaaattttatctacatttaaatcctaggatctacacctcataaagttattgaattattacccccactttacagatggaaaactgaatattaatggcagcgattcaaatctacacaatctagatgaaaagttctagaacaacattgccactgactgattaaaaagtcaactgaaggaaaagccagtgagaaacaaggcaatcaattactgtacagtatttagctttggatatgttaattctgagatccctattagacctccaagatattaaaagggagaaatttgggagagatatggggactggagatacaaatgggagagtcaggtacttaaagccactggacttaacagaggagaatacacagggagtggctactaataaagacgttgtaggactgactgagccctgggagccttccaacatttagaggtagggacgacaaggaagaatgggggttgaggggaatagccagtgaaggaaaagagacaagaaaatagtatgaagaaaactaatgggtccaggcacagtgactggccaacatggcgaaaccccgtctctactaaaaatacaaaatt

SEQ ID NO: 12706 - DNA, 622 bp, Homo sapiens
agggctcagatcttcgcaaatactgtggacaatgcccgcatcgttcagcagattgacaatgcccgtcttgctgctgatgactttagagtcaagtatgagacagagctggccatgcgccagtctgtggagaacgacatccatgggctccgcaaggtcattgatgacaccaatatcacacgactgcagctggagacagagatcgaggctctcaaggaggagctgctcttcatgaagaagaaccacgaagaggaagtaaaaggcctacaagcccagattgccagctctgggttgaccgtggaggtagatgcccccaaatctcaggacctcgccaagatcatggcagacatccgggcccaatatgacgagctggctcggaagaaccgagaggagctagacaagtactggtctcagcagattgaggagagcaccacagtggtcaccacacagtctgctgaggttggggctgctgagacgacgctcacagagctgagacgtacagtccagtccttggagatcgacctggactccatgagaaatctgaaggccagcttggagaacagcctgagggaggtggaggcccgctacgccctacagatggagcagctcaacgggatcctgctgc

SEQ ID NO: 12707 - DNA, 397 bp, Homo sapiens
atttagaagtggtaggttgaataactgatatttctagctttgtcattagtttattatgaggatcattttggaaagtcttttgatctttgcctctacaataaattagtaacaaaattatctgtattatgaggatttgtgttgttgttgtttctttatttttgtttgaaataattgttttctatatttcttttgctgcaggaaaagttttgggtttattgtgttttctcataactgtataattttattttattttaatttacttgtgtgtctgtgcatggagatgagggccttgctttgttgcccaggctggtctcgaattcatggcttcaagcaatcctcccaccttggcctcccaaagtgctgggattacagacatgagccaacataactgtataat

SEQ ID NO: 12708 - DNA, 589 bp, Homo sapiens
agcttccagcaagtacaagctcagggactctgtctacatcttccgggaaggggccttgccaccctatcggcagatgttctaccagttatgcgacttgaatgtggaagagttgcagaagatcattcaccgcaatgacggggcagagaattcctgcacagaacgggatgggtggtgcctccccaagaccagcgacgagctcagggacaccatgtccctcatgatccggcagaccatccgctccaagaggcctgctctcttttccagctcagccaaggctgatggcggaaaagagcagctgacgtacgagtctggggaagacgaggaggatgaggaggaggaggaagaggaggaggaggacttcaagccatccgacggcagtgaaagcgaaatggagacagagattctggactacgtgtgacagggcccaaggctgggcctccctgacccggccagactggtgtctggcctaatgagggagccggggctccccattgccacccacagtgcccggaatggccctaggaggccctctgaggagagctagagtcccagcaaagggtgcagctgaccctagcactggctgtgacat

SEQ ID NO: 12709 - DNA, 173 bp, Homo sapiens
cctgtagtcccagctactcgggagactgaggcaggagaacccaggagacagaggttgcagtgaactaaaatcgcgccattgcactccagcctgggcaacaagagcaaaactccatctcaaaaaaaaaaaaaaaaaggggggggggggaaggccccccttttaaaagggcccgg

SEQ ID NO: 12710 - DNA, 570 bp, Homo sapiens
taaagaaattttcctaaaggaccccatcatttaaaaaatggacctgataatatgaagcatcttccttgtaattgtctctgacctttttatctgagaccggaattcaggataggagtctagatatttacctgatactaatcaggaaatatatgatatccgtatttaaaatgtagttagttatatttaatgacctcattcctaagttcctttttcgttaatgtagctttcatttctgttattgctgtttgaataatatgattaaatagaaggtttgtgccagtagacattatgttactaaatcagcactttaaaatctttggttctctaattcatatgaatttgctgtttgctctaatttctttgggctcttctaatttgagtggagtacaattttgttgtgaaacagtccagtgaaactgtgcagggaaatgaaggtagaattttgggaggtaataatgatgtgaaacataaagatttaataattactgtccaacacagtggagcagcttgtccacaaatatagtaattactatttattgctctaaggaagattaaaaaaagatagggaaa

SEQ ID NO: 12711 - DNA, 423 bp, Homo sapiens
ttttttttttttttttttttttttttgggtgggtttgtttttgtactgctgaggaaagaagtaccagcagaagctgcagttctaggttggggaagtctggggaatcctgcaagggaacatccttcgggaagggggacagaagtggagaaggaacgactgaaaggatgctaactaggttattattagcaggaagttagggcattttcttttctggagaggctctccagtcccagcttggaggtgtgcaatgcctcagcctgggaagtatctgcagtgttcgaacaaatgagagaaaggaaggagcagtgccaagaggtacttaaggagaaagaattgtattagtgtggagccaacctttcccgggcagccaccctgcccttacacttacacacacacactttgcttcacttggcatgcaataag

SEQ ID NO: 12712 - DNA, 536 bp, Homo sapiens
tttttttttttttttttttttttcttccataaacacaaactttattgaggccctcagcactagttctctttctcctgcacagtcttggttccccggagacgtccagtccggcgggcagcaatgagacccactttgcggccagcaggggcatctctgcggatggtggagggcttgccgatgtgctggtggttgccacctccaaaaggatgctccacaggattcatggccacaccccgtactcgtggccagcagttcctctttgccttatatttgtggtacgcccggccagccttcaagatgggtttgtcaattcggccgcctccagccaccacaccaaccacagctctgttggctgaggagataaccttcttggagccggagggcagcttcacacgggtcttcttggtctcagggttgtgggagataacggtggcatagttccctgatgcccggaccagcttgccacggtctccaggcttctcctccaggcagcacacgattgtaccctcaggcatggtgcccacagggagcacatt

SEQ ID NO: 12713 - DNA, 633 bp, Homo sapiens
ttttttttttttttttttttttttttctgaaagactaaacagatatatattttatttcatctgctaaatgtctgagagcaagttagacacacattccactaagcatcaaaggccctcgtagtctcggtggaaggacaaactccagctccacatcactggtttaagtttcttcctcttcttcttcctcttcttcctcctcctcttcctcctcatcctcaacagagctgaaggtgccatcagggaggctgtagacacggatgacctgcttgttggggtccttgaggatgaggtatttgccctcctccagcttcatgcagatgtcaatgacgcagcgtaaaatgccccaggcattctccacgctcaggttgatctggctggcaaactcattaggcttgaactgctgggtgcctaggatgacgtggcgtgaggagtctttcacgtggtaccgagacacataaccaagcttgaggtactcagatccagccagcaaagcacagcaggtccaccgggccaacttgtagctgttgttcttcagctccgtggcaatgacagcccctcgctgagagtccagcttctgacgccagtcaacgccattacagtgcctggaatcccactcattgagtgtcttgatgt

SEQ ID NO: 12714 - DNA, 514 bp, Homo sapiens
agatcttacgccatgatcctcacaagctgctggaaggctgcttggtggggggccgggccatgggcgcccgcgctgcctatatctacacccgaggggaattctacaatgaggcctccaatctgcaggtggccatccgagaggcctatgaggcaggtctgattggcaagaatgcttgtggctctggttatgattttgacgtgtttgtggtgtgcggggctggggcctacatctgtggagaggagacaacgctcatcgagtccattgagggcaagcagggcaagccccgcctgaagccccccttccccgcagacgtgggagtgtttggctgccccacaactgtggccaacgtggagacagtggcagtgtcccccacaatctgccgccgtggaggtacctggtttgctggctttggcagaaaacgcaactcatgcaccaaactattcaacatctctggccatgtcaaccacccttgcactgtggaggaagagatgtctgtgcccttgaaagaactgat

SEQ ID NO: 12715 - DNA, 508 bp, Homo sapiens
ggccgccatcatcctcacctatgatgtgaatcaccggcagagcctggtggagctggaggaccggttcctgggcctgacagacacagccagcaaagactgcctcttcgccatcgtggggaacaaagtggacctcactgaggagggggccttggcgggccaggagaaggaagagtgcagtcccaatatggacgctggggaccgtgtctccccaagggcacctaagcaggtgcagctggaggatgcggtggccctttataaaaagatcctcaagtacaagatgctggatgagcaggatgtgccggccgctgagcaatgtgctttgagaccagcgccaagaccggctacaatgtggacctcctgtttgagaccctctttgacctggtggtgccaatgatcttacagcaaaaagctgagaggccgtcacacacagtggatatatccagtcataagccacccaagaagaccagatctgggtgttgtgcctgactttcgagggcctcctggactc

SEQ ID NO: 12716 - DNA, 599 bp, Homo sapiens
tgagactcaccggccgcacgccatgagggccctgtgggtgctgggcctctgctgcgtcctgctgaccttcgggtcggtcagagctgacgatgaagttgatgtggatggtacagtagaagaggatctgggtaaaagtagagaaggatcaaggacggatgatgaagtagtacagagagaggaagaagctattcagttggatggattaaatgcatcacaaataagagaacttagagagaagtcggaaaagtttgccttccaagccgaagttaacagaatgatgaaacttatcatcaattcattgtataaaaataaagagattttcctgagagaactgatttcaaatgcttctgatgctttagataagataaggctaatatcactgactgatgaaaatgctctttctggaaatgaggaactaacagtcaaaattaagtgtgataaggagaagaacctgctgcatgtcacagacaccggtgtaggaatgaccagagaagagttggttaaaaaccttggcaccatagccaaatctgggacaagcgagtttttaaacaaaatgactgaagcacaggaagatggccagtcaacttctgaattgattg

SEQ ID NO: 12717 - DNA, 646 bp, Homo sapiens
tacggccgggcttgggctgcgtggagatactttttgcgatgcctactggagactttgatttccgcagttcgaagcccagttgggccgaccaggtggaggaggagggggaggacgacaaatgtgtcaccagcgagctcctcaaggggatccctctggccacaggtgacaccagcccagagccagagctactgccgggagctccactgccgcctcccaaggagggcatcaacggaaacataaagacagtgacagagtacaagatagatgaggatggcaagaagttcaagattgtccgcacctccaggattgagacccggaaggcttcaaaggctgtcgcaaggaggaagaactggaagaagttcgggaactcagagtttgacccccccggacccaatgtggccaccaccactgtcagtgacgatgtctctatgacgttcatcaccagcaaagaggacctgaactgccaggaggaggaggaccctatgaacaaactcaagggccagaagatcgtgtcctgccgcatctgcaagggcgaccactggaccacccgctgcccctacaaggatacgctggggcccatgcagaaggagctggccgagcagctgggcctgtctactggcgagaaggagaagctgccgggagagct

SEQ ID NO: 12718 - DNA, 399 bp, Homo sapiens; identical to SEQ ID NO: 1447

SEQ ID NO: 12719 - DNA, 515 bp, Homo sapiens
ccgccgtgttttgggccggttctggagtggctggcggcggggcctgggtgtccgcccagtgcccgaggacgcaggctttggcaccgaagcccggcatcagaggcaaccccgcggctcctgccaacggtcggggcccctcggggaccagcccttcgcggggctgctgccaaaaaacctcagtcgggaggagctggttgatgcgctgcgggcagccgtggtggaccggaaaggacctctagtgacgttgaacgagccacagggtctaccagtgacaggaaaaccaggagagctgacgttgttctcagtgctgccagagctgagccagtccctagggctcagggagcaggagcttcaggttgtccgagcatctgggaaagaaagctctgggcttgtactcctctccagctgtccccagacagctagtcgcctccagaagtacttcacccatgcacggagagcccaaaggcccacagccacctactgtgctgtcactgatgggatcccagctgcttctg

SEQ ID NO: 12720 - DNA, 400 bp, Homo sapiens
ggtggcaggtggctccagccccgggcctggctggggttcccagacgcctggggcctccccaccccgcagcaggcccggggcaaggctcgcgggaatgagtatcagccgagcaacatcaaacgcaagaacaagcacggctgggtccggggggggagcacgccggccggcgtgcaggtcatccttcgccgaatgctcaagggccgcaagtcgctgagccattgaggatcgcgacgcagtcggcgggaccctcatggaagcatcgcccccgcctcggaccttgcctggcgctatttttgcagggagctggggagcaagaacgcctcggacctgagtgctctccatattgtggggttgaagtctggatgggagcttgccaaatccctttttaggctttttaatt

SEQ ID NO: 12721 - DNA, 452 bp, Homo sapiens
agcagatacaaaaattggctgggtgtggtgccacatgcctgtaattccagctacttgggaggctgaggcatggagaatcgcttgaacccaggaggcagaagttgcagtgagcagagatcacaccactgcactccagcctgggcaacagagtaagactccatccacacacacacacacacacacaaaattgaaaagtgaagacattttaatggagatttaatagtgcttccacactaatgaactaatggagttttggctccactcatgagtgtatttgaaatgtaagtaaccagctacaaagaataatgtcacttcatttgattatgactaccaatcaagagaaggaggaatacatttctgaggagtgatactaaaccatttgagcttaaatgagtacctgattttgcagcccttaaaacgagtcaataactatgtggaaatatagaaaaata

SEQ ID NO: 12722 - DNA, 557 bp, Homo sapiens
tccgtggcaatgaattcttctgtgaagtggatgaagactacatccaggcacaaatttaatcatactggactcaatgggcaggtccctcactatcgacaagctttagacatgatcttggacctggagcctgatgaagaactggaagacaaccccaaccagagtgacctgattgagcaggcagccgagatgctttatggattgatccacgcccgctacatccttaccaaccgtggcatcgcccagatgttggaaaagtaccagcaaggagactttggttactgtcctcgtgtgtactgtgagaaccagccaatgcttcccattggcctttcagacatcccaggtgaagccatggtgaagctctactgccccaagtgcatggatgtgtacacacccaagtcatcaagacaccatcacacggatggcgcctacttcggcactggtttccctcacatgctcttcatggtgcatcccgagtaccggcccaagagacctgccaaccagtttgtgcccaggctctacggtttcaagatccatccgatggcctaccagctgcagct

SEQ ID NO: 12723 - DNA, 489 bp, Homo sapiens
gaagaagagtcccacgaactggctgggtatacagaaatgtccagaggccggagagcgtttcagatcacatgtaccggatggcagttatggctatggtgatcaaagatgaccgtcttaacaaagaccgatgtgtacgcctagccctggttcatgatatggcagaatgcatcgttggggacatagcaccagcagataacatccccaaagaagaaaaacataggcgagaagaggaagctatgaagcagataacccagctcctaccagaggacctcagaaaggagctctatgaactttgggaagagtacgagacccaatctagtgcagaagccaaatttgtgaagcagctagaccaatgtgaaatgattcttcaagcatctgaatatgaagaccttgaacacaaacctgggagactgcaagacttctatgattccacagcaggaaaattcaatcaccctgagatagtccagcttgtttctgaacttgaggcag

SEQ ID NO: 12724 - DNA, 622 bp, Homo sapiens
tacggccggtgacactgttaaattactattacattccatcacaggaggaattatgcatcagcttgttctcatgtgattctcatgtgccaaaaagtattttctgagccaataaaaagaaaattattttttcagtagtttttaaatcttcctgtgtccccaaaatgtctccatgaatttaatgtcaaattaaaaaccaagccaaggctgggtacagtggtgcacacttgtagtcctggctacacgtggggctgggacaaggggatcacttgagcccaggagttcaaggctgtaatgctttatgatcatacctgtgaatagccactgcactccagcctgggcaacacagtgagacctcgtctctaaaattattagaggctgggcacagtggctcacacctgtaatcccagcactttgggaggctgaggcaggcggatcacttgaggtcaggagttccagaccagcctggccaacatggtgaaactccgtctctactagaaatacaaaaattagccgggcatggtggcaggtgcctgtaatcccagctagtcgggaggctgaggcaggagaatcacttaaacccgggatggggaggttgcagtgagccaatatcgcatcactgctc

SEQ ID NO: 12725 - DNA, 619 bp, Homo sapiens
ggccgggtgcagtggtgtcatcttggctcactgcagcctctacctcctgggttcaagcgattctcatgccttagcctcctgagtagctggaactacaggcgtgcaccaacacgcccagctaagttttgtatttttagtagagacagggttttaccgtgttggccaggctggtcttgaacccctgacctcaagtgatccactcgcctcagcctcccagagtgctgggattacagcgtgagccaccacgccctgccactcctatttaatcttcaaaacaatcctataaagttgattaaaggcgtcctagttttataaataaagaaaaggaaagggtcagagatgttcagttatgggcaaaattacatagctgggatttgatccatgtttttagatgcattttgataacagtaggagcaggaacatggaaagtggagagcgagaattaagtaggtcttggaattcagttggaaagagggagggaatcctcagttggaaatttctcagttggaaagagggaaagtgtatttgaaatgaccaattctagctatgttaggaatctgtgagtgactgactgactgactgcctgactgcctcagttacctgcttacttctttccttc

SEQ ID NO: 12726 - DNA, 455 bp, Homo sapiens
tacggccgggtgcagcggctcaacccaagtcccagcactttgggaggccgcggtgggcagatcacgaggtcaggagttgacacgagcctggccaatatggcgaaaccccatccccaccaagaatacaaaaatcagccgggcatggtggcacacacccgtagtcccagccactcagaggccgaggcagaggaactgcccgaacccgggagacggaggttgcagtgagccaagattgtgccattgcactccagcctgggggacagagcgaaactctgtctcaaaaaatatatgtgtgtgtgtgtgtgtgtgtgtgtgtgtgtgtgtgtgtgtgtgtatctatatatatctcaaaaataagagatcatttgagagattatcattataaaagacaagatagtgttcaacttagtgactaatttaattatctctatgggactttgtgtacactacacaga

SEQ ID NO: 12727 - DNA, 532 bp, Homo sapiens
atgaatgtaaaagggaaataaaagtcttttgaaggtagctatactagcacttttgatcattcttcagggcccacaaaaatgttgtcaagaattttaaaggtttataattctgcttaagctctagtttggacttaggtatcctaactatgttggaggtatttgcattgttttaagttaggataaaagcaagttcctcctgtgactgcaacgtcttactgattgggacagttgccaggaggataccaacttgatagcagagggggttttatgcaaacgcactcacctccgccttggggaatgaaagggtcacttctgcatcatcactagctagttttctagtgttagagaggcttacaaatgtttgccattctcataagtgttttgaacttgatctttgtgacttgtgctttttagcttctctcttgaatcagagtatcattgtcttcctccaaggagttagaatttcccagtttaaaacaaaaagggaaatgtcctaggttttctttgtgcttctcatttttcctttgttgat

SEQ ID NO: 12728 - DNA, 547 bp, Homo sapiens
tacggccgggacatgaggtgtactgaagggtcacagcagagtgagttcctggtgtatccacaaggaaatgagcacggaactctcacaacagcgtgtgtgctgtgcgctgtgcttgaatagctgactgctcctttatacacagcctctgtgctgggattacaggcatgagccaccgcacctggccattcatttcttttaaactaagacattgtgccataagcctgatttaatgttcacatttgtgattaagtagtagaattttgctagtagacctctttcttttcagaagaccagtgaaataccaggtctgagtaaagtaatccttttaaaaggtagcattttccatgtcatatgtgcatatacacacacacattttatgtattatatataaaaaatatgtatattatatagaaattacatcaacaattaaattcctcatttttttaagaagataaaaaactgtctcaatattaacaaggaaggtcaagtgagaacttacatgcacacctctggttaataatgtgtatcatatattctttctggaaag

SEQ ID NO: 12729 - DNA, 483 bp, Homo sapiens
gggggcgcagcgcgcacgcaatcgcgtttccggagagacctggctgctgtgtcccgcggcttgcgctccgtagtggactccgcgggccttcggcagatgcaggcctggggtagtctcctttctggactgagaatattttaatggagaagcccctcttcccattagtgcctttgcattggtttggctttggctacacagcactggttgtttctggtgggatcgttggctatgtaaaaacaggcagcgtgccgtccctggctgcagggctgctcttcggcagtctaaccggcctgggtgcttaccagctgtatcaggatccaaggaacgtttggggtttcctagccgctacatctgttacttttgttggtgttatgggaatgagatcctactactatggaaaattcatgcctgtaggtttaattgcaggtgccagtttgctgatggccgccaaagttggagttcgtatgttgatgacatctgatt

SEQ ID NO: 12730 - DNA, 325 bp, Homo sapiens
tcaggagtttgagaccagcctaaccaacatggtgaaaccccatctctactaaaaatgcaaaaattagctgggtgtggtggcgcatgcctgtaatcctagctactcaggaggctgaggcaggagaatcacctgaacccaggaggcggaggttgcagtgagctgagatcgcaccattgtactccagcctgggtaagaagagcgaaactccatctcaaagaaaaaaaaaaaaaaaaaaaaaaaaaaaaaaaaaacttttgggggccccccccccttttgggggggctttttttgacccccccccctaaaaaaaaccttgggggggggg

SEQ ID NO: 12731 - DNA, 510 bp, Homo sapiens
  misc_feature 233: n = A,T,C or G
tacggccgggtgtggtggttcaacctgtaatccagcactttgggaggccgaggcaggtagatcatgaggtcagaagatcaaaaccatcctggctaacacggtgaaaccccatctctactaaaaatacaaaaaattagccgggtgtggtggcacacacctgtagtcccagctactcgggaggctgaggcagaagaatcgcttgaacctggaggtggagggtgcagtgggccaanatcgcaccactgcactccagcctgggtgacagagcgagactctgtctcaaataaataaattatttcacagaggatagcaagctccagaaggttctattacctttaaaaaagagtagttttgcccctcccagcaacctggtatgggtgccctaagaccagtctgaactcacactgtctgaaaggccacccaggatccaaatcgggccatcttcattgccatgagtgttcggacaggctctgcgtgccaggcaaccgtgggcagacaaagggctccctg

SEQ ID NO: 12732 - DNA, 568 bp, Homo sapiens
gttccgggcgttccatcgtccgtgcgcaccgcccggcgtccagatttggcaattcttcgctgaagtcatcatgagctttttccaactcctgatgaaaaggaaggaactcattcccttggtggtgttcatgactgtggcggcgggtggagcctcatctttcgctgtgtattctctttggaaaaccgatgtgatccttgatcgaaaaaaaaatccagaaccttgggaaactgtggaccctactgtacctcaaaagcttataacaatcaaccaacaatggaaacccattgaagagttgcaaaatgtccaaagggtgaccaaatgacgagccctcgcctctttcttctgaagagtactctataaatctagtggaaacatttctgcacaaactagattctggacaccagtgtgcggaaatgcttctgctacatttttagggtttgtctacattttttgggctctggataaggaattaaaggagtgcagcaataactgcactgtctaaaagtttgtgcttattttcttgtaaatttgaatattgcatattgaaatttttgtttatgatctatga

SEQ ID NO: 12733 - DNA, 531 bp, Homo sapiens
ctgaggcagggagaattccttgaatccggtaggcagaggttgcagtgagccaagatggtgccactgcactccagcctgggctgcaaaacaagactctgtctcaacaacaacaacaacaacaacaacaacaacaaacaaatttagtgaatccaggtaattttatatgacctgtatatgtataatagttttaatctttgaaaattttttgagcagaaaaggctcataatgttaagtttccagactgagatcagcagactacatgaagaataacttagagtccaacttggcaggagtgaactgaaactgagcacagagctaggaaacttgaaggaataatttgatatactttttacaacagtggaaagatgggaggcagggaaccctacagacctttaaggtcttttgagctacaaaatttaaaaaggagcaaaatattagaacagttgtcagttatttttaatcaatgaaaaaccacctaaacttggttagctcgaaagaaataacaaaagaagacatattggagcatctaaa

SEQ ID NO: 12734 - DNA, 57 bp, Homo sapiens
tctccacgtctccagaacaagattccacctgggagtttcttagactgattcttgacc

SEQ ID NO: 12735 - DNA, 616 bp, Homo sapiens
atcaaacttggtctgggtattgatgaagatgaccctactgctgatgataccagtgctgctgtaactgaagaaatgccaccccttgaaggagatgacgacacatcacgcatggaagaagtagactaatctctggctgagggatgacttacctgttcagtactctacaattcctctgataatatattttcaaggatgtttttctttatttttgttaatattaaaaagtctgtatggcatgacaactactttaaggggaagataagatttctgtctactaagtgatgctgtgataccttaggcactaaagcagagctagtaatgctttttgagtttcatgttggtttattttcacagattggggtaacgtgcactgtaagacgtatgtagcatgatgttaactttgtgtggtctaaagtgtttagctgtcaagccggatgcctaagtagaccagatcttgttattgaagtgttctgagctgtatcttgatgtttagaaaagtattcgttacatcttgtaggatctactttttgaacttttcattccctgtagttgacaattctgcatgtactagtcctctagaaataggttaaactgaagcaacttgatggaaggatct

SEQ ID NO: 12736 - DNA, 622 bp, Homo sapiens
ctctccagagtggccctgtcagtgaacccaggctgaagaccacaggttaatctttgcccaggctggccttggtggcagagctattgtggacgatgaaaggctctctgcagaggagatggatgagaggaggcggcagaacattgcttatgaatatctgtgccacttagaggaagccaaaaggtggatggaagtttgcttagttgaagaattgccaccaaccactgaattggaagaagggctccggaatggagtttaccttgcaaagttagccaagttctttgccccgaaaatggtgtcagagaaaaagatctatgatgtggaacaaacacgttataagaagtctggccttcattttcgacacacagataataccgtccagtggttaagagcgatggagtctattggtctacccaagatattttatccagaaacaacagatgtctatgatcggaaaaacataccaagaatgatatattgcattcacgcactgagtttatatctgttcaaactaggaatagcaccccagatccaggatttgttgggcaaagtagacttcacagaggaggaaatcagtaatatgagaaaagaacttgagaaatatggaatacagatgccatctttc

SEQ ID NO: 12737 - DNA, 383 bp, Homo sapiens
agctaactggattccattcatacagatgtacaggggagttggggtgggggttatcttcttttattttagaatattaaaacaaaattattacattaagactgccacaatcatttaattcaatgacaagaatcatctttaaatggctggttgagaggcagtcccagtagagaattaagtggcctgaacagaagactgactttgccaaccaccttgaccatgagaaaatgatttctgtcctcagcaagccgccctgtcctgtgtgtttttgaggaaagcacatgcaaagagacatagaaacgttttgtaattagctgcacttttagatttgaaaaacaaataaaaacgatagggagctaatatggtccaggaagtacagagagtaa

SEQ ID NO: 12738 - DNA, 457 bp, Homo sapiens
tttttttttttttttttttttttttggccgggcgtgatggtgggcgcctgtattcccagctactcaggaggttgaggcaggagaaatcgcttgaacctgggaggcggaggttgcagtgagctgagatcgtgccactgcattgcagtctgggctacagggcgagactccgtctcaaaaaacaaacaaacaaacaaaaaacagtaatccgaactgatttaaacttctttattaacagaatatatgttcaaacaaagcttaaagtcccattttctttccattggcgtccaggcccctattactcaactatccgttggttagggcctgcacctcaaggtaggcttaattgtaaatcaaaatatttactatccacacttagagggctatctgtaacatcgtttttatttacccccgtccattcgataatcgtctgaaatgcaagacattaagttgaacatca

SEQ ID NO: 12739 - DNA, 420 bp, Homo sapiens
tttttttttttttttttttttttgagagtcactgctgctttatttacatgcgtcaccatctcttttacaaactagattacggttttaagtggaatacacaaggcaatatctacaaacaccaaggaaagttaagtactgcatctctatttcatttggaaaggggaagattcccaaatcaaactggttttgatccttaagaaaggcggcagagttaattcatggcaacatatggttagacaaaatcctcagtaagaatgccatatgatagtgttcgcattgaaagaaggatgaggtgcttcaaatcaaagtctcaactgcttgactctcaggtgtttaaatatggccacacaccatatttagttctagattatatgggatatgagcaaggaattgaaacagataagatagtttttacagata

SEQ ID NO: 12740 - DNA, 596 bp, Homo sapiens
tagcagaggactttttagctgctcactggccccgcttgtctggccgacttatccgcccgcgacccctaatcccctctgcctgccccaagatgctgaagccagccctggagccccgagggggcttctccttcgagaactgccaaagaaatgcatcattggaacgcgtcctcccggggctcaaggtccctcacgcacgcaagaccgggaccaccatcgcgggcctggtgttccaagacggggtcattctgggcgccgatacgcgagccactagcgattcggtcgtggcggacaagagctacgagaagatccacttcatcgcccccaaaatctactgctgtggggctggagtagccgcggacgccgagatgaccacacggatggtggcgtccaagatggagctacacgcgctgtctacgggccgcgagccccgcgtggccacggtcactcgcatcctgcgccagacgctcttcaggtaccagggccacgtgggtgcatcgctgatcgtgggcggcgtagacctgactggaccgcagctctacggcgtgcatccccatggctcctacagccgtctgcccttcacagccctgggctctggt

SEQ ID NO: 12741 - DNA, 542 bp, Homo sapiens
atacaaagacagcacgctaataatgcaattactgagagacaacttgacattgtggacatcggatacccaaggagacgaagctgaagcaggagaaggaggggaaaattaaccggccttccaacttttgtctgccttattctaaaatttacacagtagaccatttgtcatccatgctgtcccacaaatagttttttgtttacgatttatgacaggtttatgttacttctatttgaatttctatatttcccatgtggtttttatgtttaatattaggggagtagagccagttaacatttaaggagttatctgttttcatcttgaggtggccaatatggggatgtggaatttttatacaagttataagtgtttggcatagtacttttggtacattgtggcttcaaaagggccagtgtaaaactgcttccatgtctaagcaaagaaaactgcctacatactggtttgtcctggcggggagtaaaagggatcattggttccagtcacaggtgtagtaattgtgggtactttaaggtttggagcactta

SEQ ID NO: 12742 - DNA, 551 bp, Homo sapiens
acggccgggattcatatgtaatactgcagagaagttaattggatatggttatgaagaaattattagagaaattgcatatgtcaaggcagaagggtctcagtttgtgtttaggaggagggctgcaagtaatatgaaaaagaagaggattttgggattgaggtcccctgggagtgttgagaagttgaattctagagctgtggttcctgacctacaagccctgaagttgttacagggtgttcattgcttattcatatgcttataactttgtctgtaagttgaataaagattgttctagatcattgaataataaaaatttaacccattgttgtgaaggagcctcagaatattttgatgttaacaaaagagttctgtatttacaaagttggagaaacactcatcaagagttaggagtaaggcccagtgtggggttccctctggtaataccagcattttgggaggctgaggtgggcgaatcacttgaggtcaggagtttgagaccagcctggccaacatagcgaagccccatctctactaaaaatacaaaaattagc

SEQ ID NO: 12743 - DNA, 546 bp, Homo sapiens
aggaaaaagaggaaaccagtcggggaagaatgtgatggtggagccgcatcggcatgagggtgtcttcatttgtcgaggaaaggaagatgcactggtcaccaagaacctggtccctggggaatcagtttatggagagaagagagtctcgatttcggaaggagatgacaaaattgagtaccgagcctggaaccccttccgctccaagctagcagcagcaatcctgggtggtgtggaccagatccacatcaaaccgggggctaaggttctctacctcggggctgcctcgggcaccacggtctcccatgtctctgacatcgttggtccggatggtctagtctatgcagtcgagttctcccaccgctctggccgtgacctcattaacttggccaagaagaggaccaacatcattcctgtgatcgaggatgttcgacacccacacaagtaccgcatgctcatcgcaatggtggatgtgatctttgctgatgtggcccagccagaccagaccccgattgtggccctgaatgcccacaccttcctgcgtaatgg

SEQ ID NO: 12744 - DNA, 407 bp, Homo sapiens
caagatggcggccgtggggcgagtcggctccttcggttcttctccgccgggattatcctcgacttacactggcggccccttgggcaacgagatagcgtcgggcaacggtggcgccgcggcaggcgacgacgaggacgggcagaacctttggtcctgcatcctcagcgaggtctccacccgctcgcgctccaagctccctgcggggaagaacgtgctactgctgggtgaagatggagctggaaaaacaagcttaataagaaaaattcagggaatagaggagtataagaaagaaagagaaaatcagttcgtggttgcattgtggatgcaaatctgagcgttctcaacttggttattgtaaaaaaaggagagaaggatattcctggactgactgatactacagtgcctcg

SEQ ID NO: 12745 - DNA, 448 bp, Homo sapiens
  misc_feature 100, 101: n = A,T,C or G
aatggtgggaatcattacaaaacattatgaatatagttaaagcaactgaactgtacacttaaaatagttaatgtgatacattttatgttacatgtatttnntgcccactgaaaaaataaaaatatataaacacacagcaaatgatgaccaggcctttgaagaaagcttataaaacaaaattaagaagccaaggctgggagtggtggctaacgcctgtaatcctagcactttgggtggctgagatgggcggatcacgaggtaaagacatcgagaccatcctggccaacatggtgaaatgtatgtttagtctctactaaaaatacaaaatttagctgggtgtggtggcatgtgcctgtagtcccagctactgaacccgggaggtggagattgcagtgagctgagatcgcgccacagcactccagcctggctacagagcgagactctgtct

SEQ ID NO: 12746 - DNA, 587 bp, Homo sapiens
tccgggcccgcggcaacctcgggcgctgttctgcaggccgcgaccggcatgtacgagcaactcaagggcgagtggaaccgtaaaagccccaatcttagcaagtgcggggaagagctgggtcgactcaagctagttcttctggagctcaacttcttgccaaccacagggaccaagctgaccaaacagcagctaattctggcccgtgacatactggagatcggggcccaatggagcatcctacgcaaggacatcccctccttcgagcgctacatggcccagctcaaatgctactactttgattacaaggagcagctccccgagtcagcctatatgcaccagctcttgggcctcaacctcctcttcctgctgtcccagaaccgggtggctgagttccacacggagttggagcggctgcctgccaaggacatacagaccaatgtctacatcaagcacccagtgtccctggagcaatacctgatggagggcagctacaacaaagtgttcctggccaagggtaacatccccgccgagagctacaccttcttcattgacatcctgctcgacactatcagggatgagatcgctgg

SEQ ID NO: 12747 - DNA, 563 bp, Homo sapiens; identical to SEQ ID NO: 1526

SEQ ID NO: 12748 - DNA, 578 bp, Homo sapiens; identical to SEQ ID NO: 1530

SEQ ID NO: 12749 - DNA, 472 bp, Homo sapiens
aggcccaagctaaccttctccattggttgtgcggctcacaagtgaaggaagcaccctttctggctgtgacattgaacttgttggagcagggtatcgattttcactcatcaagaaaaggtttgctgcaggaaaatacttggcagataactaatgaaatcttatgcaaggatttggaggattcatataatggagaactgatgtatgagaaacagattttaattttggtttgatgaaaacaaaccaatatctgcacttgggatatatcaggtggaaagtcaatgactttcatctgtgatttccctcacacactaccatgatgaccagtcctacagtatttacttctaggcgtaatattgttaatggtcttaaaatgtaattattgtatttgtaaattgtactctcattccagtaaggcagttagacacttgacttttagcattttaccattcctgaaatggatgtaatttaaact

SEQ ID NO: 12750 - DNA, 565 bp, Homo sapiens
tacggccgggacaggtcattaatagcatctgggctctatggctacaatgccaccctggtgggagtactcatggctgtcttttcggacaagggagactatttctggtggctgttactccctgtatgtgctatgtccatgacttgcccaattttctcaagtgcattgaattccatgctcagcaaatgggacctccccgtcttcaccctccctttcaacatggcgttgtcaatgtacctttcagccacaggacattacaatccattctttccagccaaactggtcatacctataactacagctccaaatatctcctggtctgacctcagtgccctggagttgttgaaatctataccagtgggagttggtcagatctatggctgtgataatccatggacagggggcattttcctgggagccatcctactctcctccccactcatgtgcctgcatgctgccataggatcattgctgggcatagcagcgggactcagtctttcagccccatttgaggacatctactttggactctggggtttcaacagctctctggcctgcattgcaatgg

SEQ ID NO: 12751 - DNA, 113 bp, Homo sapiens; identical to SEQ ID NO: 1537

SEQ ID NO: 12752 - DNA, 53 bp, Homo sapiens
aaataagctaccatatagcttacaagtctcaaatttttgccttttactaaaat

SEQ ID NO: 12753 - DNA, 589 bp, Homo sapiens
ttttttttttttttttttttttttcctaaaaagggatggtcaagtttttgaatttaagattttattctcacttcgtctgtttagatttgttatatcagagcctttctttacttattaacaatctcttgtagtaaacatgtgtaatctgatttccttcaactttctccaaactcaaatatctacaaatcaccttcatgtcttcatactattttggaaaatagtttctccagttctcaaatgttactgagtgtatttccatgtcccaggagcttggcaatttttttctatcataattggcaataccaggaatgggctaattgcctttggaggtcagaacttctttagtatttttatttttttattggtcttgggtcactagaaggaactgttactgtgtcctggctgtggctagcagtgacaagactgtcttttgagggcgctgccaggcttaattgcatccaatatagggatcttcatctgagatttggaacaatgaatcttccatgccaattaaagatgagtttaatatagagaatatgaagtatgcctagcagaggaacagttttacagagcctcaggatcccatctg

SEQ ID NO: 12754 - DNA, 607 bp, Homo sapiens; identical to SEQ ID NO: 1553

SEQ ID NO: 12755 - DNA, 470 bp, Homo sapiens
cagttgtctgctgtctgtaattcagtttgcgtgtattttatgctcatgcaccgacccatacagagtaaatcttttatcaactatatactggtgtttaatagagaatgattgtcttccgagttttttggttccttttttaactgtgttaaagtacttgaaatgtattgactgctgactatattttaaaaacaaaatgaaataatttgagttgtattacagaggttgacattgttcagggatgggacaaagccttcttcaatccttttcatactacttaatgattttggtgcaggaacctgagattttctgatttatatttcatgatacttcacatttgctcttcacagcatgagcatgaagcccagtggcaccaaatggctgggtacaatcaagtgatattttgtagcacctcactatctgaaaggccatgagttttcagatgatttcattgagcttcattgcagcctgaa

SEQ ID NO: 12756 - DNA, 393 bp, Homo sapiens
gcagtgatggaagccagaaggaatgaaggcctgcagtgaggatggagtggtcggcctgaagccatctctagcaagtggtcaggacgctgattgttctgcgcaggttggaggtaggtggtgagtctgagaaaggggccggaaagactccccagcaactgctggcaaagggtgaagggcacgttcccacaggattcaagccagctgcctttggaggggagacgggcactcagtttaggcgctcctacagcagggtcagcaagacaagcaggttgcggcaagggtctgcgcactgctgtgtaaatgtaggggcatcggggggcagaaagaccaggggagaagtgtgcatcacccttggggttaagggacagttgtctgctaggtgttgcttcctgg

SEQ ID NO: 12757 - DNA, 465 bp, Homo sapiens
gaggaggacccagaagaagaacatgagctgcctgtggacatggaaaccatcaacctggacagagatgcagaggatgttgatttgaatcactatcgcatagggaagattgaaggatttgaggtactgaagaaagtgaagactctctgcctccgccaaaatttaattaaatgcattgagaatctggaggagctacagagtcttcgagagctggatctttacgacaaccagatcaagaagattgagaatctggaggcgctaacagagctggagattctagatatttcttttaatctgctgagaaacatcgaaggggttgacaagttgacacgactgaaaaaactcttcttggtcaacaataaaatcagtaaaattgagaacttaagcaacttacatcaactacagatgctagagctgggatctaaccgcatccgggcaatcgaaatatcgacaccttaaccaacctgg

SEQ ID NO: 12758 - DNA, 427 bp, Homo sapiens
aaaagatatgggttctgtagccttggatgcagggactgccaaagacagcttatctcctgtgctgcacccttctgatttgatcctgactcgaggaaccttggatgaagaggatgaggaagcagacagcgatactgatgacattgaccacagagttacagaggaaagccatgaagagccagcattccagaattttatgcaagaatcgatggcacaatactggaagagaaacaataaataggagactttagcacacttcacttgtttctagaagtccagaattttggacctccacgtgaaagaactgttcttacctctgagctgggggctcccataagggataattgtcctcagagtagcaaagtttctcttattagagaaatcttgtgactcacatgaagtcagggatagaagacccttggacctggca

SEQ ID NO: 12759 - DNA, 567 bp, Homo sapiens
tagagggggatatgatagtctgcgcagcgtatgcacacgaactgccaaaatatggtgtgaaggttggcctgacaaattatgctgctgcatattgtactggcctgctgctggcccgcaggcttctcaataggtttggcatggacaagatctatgaaggccaagtggaggtgactggtgatgaatacaatgcggaaagcattgatggtcagccaggtgccttcacctgctatttggatgcaggccttgccagaactaccactggcaataaagtttttggtgccctgaagggagctgtggatggaggcttgtctatccctcacagtaccaaacgattccctggttatgattctgaaagcaaggaatttaatgcagaagtacatcggaagcacatcatgggccagaatgttgcagattacatgcgctacttaatggaagaagatgaagatgcttacaagaaacagttctctcaatacataaagaacagcgtaactccagacatgatggaggagatgtataagaaagcccatgctgctatacgagagaatccagtctatgaaaagaagccca

SEQ ID NO: 12760 - DNA, 649 bp, Homo sapiens
tatttagttactgatttacagtaacccctccttattatgggggatacattccaaaaccatcagtggatgcctggaactgttaatagtactgaaccctatatagcactatcttttttcctatacatacatacctatgataaagtttaatttgtaagagattaataatgactaataataaaacaattatgacagtatattgtaataaaagttgtatgaatgtggtctctcagaatatcttagtatactgtactcacctattttcagaccatggttgactgtagataactgaaactgtgaagagcaaagccatggataagagagactactgtatctggttttttgttttgagaaacagctggtcttattatgtatcaggtctaaatctgcaggtctaggccaggtgcagtggctcatgcctgtaatccaagcactttgggaggctgaggcgggtggatcacctgaggtcaggagttcgagaccggccaggccaacatggtgaaaccccgtctctgttaaaaatacaaagattatccaggtatggtggcacacccctgtaatcccagctacttgggaagctgaggtggcagaattgcttgaacccggaaggcggagggtgcagtgagccgagatcatgccactgcactccagc

SEQ ID NO: 12761 - DNA, 608 bp, Homo sapiens
ttggcattgtgtctggaatgcccaatgtcaaatgggaccggattgcccctgctagcaatgtctcccacactgtggtcctgtgccctctcaaggctggttatttcaacttcacctcggcaacaattacttacctggcccaggaggatgggcccgttgtgattggctctaccagtgcacctggacagggaggaatcctggctcagcgggagtttgacaggcgattctcccctcattttctggactgggcagcctttggggtcatgacccttccccccatcggcatccccctgctattgtggtactcagcaagaggaaatatgacactcccaaaacgaagaagaactgattggggcttccacagccctcctctcccaagaaatccaggctcctctcccaagaaatccaggtgctttccagactccaaagggtatcttaaatgcaatctcttctctcttagcccttggccactttctcctggatcctgccctgctctcagccatagtgaaggaccagccctaggagtctgcgagagcctccttggttccatcgtgaagccataaacaggaatgcctttggcaatagccttgagcctagtgggccctctgatg

SEQ ID NO: 12762 - DNA, 639 bp, Homo sapiens; identical to SEQ ID NO: 1567

SEQ ID NO: 12763 - DNA, 550 bp, Homo sapiens
agctcgaggccatgagcagatgtaccagcccagtgaacccagctgtcttcccccatctgaccgtggtgcttttggccattggcatgttcttcaccgcctggttcttcgtgtatcctttcactgagcagccagaggaccagcattagtgatgtgggaagctcagggagaaaccacgctaggtacatggaccccgccggttttgtacattggattggggctgagagaagattgccgtgggctgggctctctgcactccacagtccaccccttcgctttgccttaactgctgtgcccagttacgaggtcacctctaccaagtacactcgtgatatctataaagagctcctcatctccttagtggcctcactcttcatgggctttggagtcctcttcctgctgctctgggttggcatctacgtgtgagcacccaagggtaacaaccagatggcttcactgtaacctgcttttgtaaattacttttttttactgttgctggaagtgtcccacctgctgctcataataaatgcagatgtatagtaaaaaaaaaaaa

SEQ ID NO: 12764 - DNA, 331 bp, Homo sapiens
ttttttttttttttttttttttttttcttttggggggagccctttgaggaatccccttggcctgcatctcatcatttatgaaatttctaagtgtgcgtcgaatgtaaatacgagccaagtcctgtagattcctgacagcacagggagggagtcccacagaatctggtttgccattatcattcttacttggttgcacaagtggagcaaatgaaacagcaaggatatttttactttcccaagtgttctgtccagttcgcataatctgtgttaactgatcctctataggcatgactaatatgcctccaacttttagtaatattttcatgtagtt

SEQ ID NO: 12765 - DNA, 434 bp, Homo sapiens
tttttttttttttttttttttttttctgagacgctaatttttgtatttttagtagagacagggtttcaccatgctggccaggctggactcaaactcatgacttcaggtgatccgcctgccttggcctcccaaagtgttgggaatacaggcatgagccaccacgcccggcctaaattcaatatgaaatagaaacgcagccacagagtctgcccatatcctggtcattgcatgttttgtgtggaacttctgggagggactttgatgaccttgtacttttgttttaacagtcactgttatcgcaataataaaaacctatttcagttgaagccctaccctttgccagctgtatgaactgcaataaattactttatttccctgtttacttttctatctgtaagataaataaaataacactaccttcctttcaggataca

SEQ ID NO: 12766 - DNA, 573 bp, Homo sapiens
tttttttttttttttttttttttttgtgtcacccaggctggactagtggtgtgatatcagctcactgcaacctctgcctcccagattcaaggattctcctgcctcatcctcctgagtaactgggactacaggcacacgccaccacattggccaggccggtcttgaactcctggtgccaactgatccacccgcctcaacctcccaaagtgagccctgcctgacacctgtttttggtatcaggaaaaaaaacatcactaacgttatttttaaaaatccacttggctgttatctccatagatgaaaaaaactctatcctaaattaaaactagcatgtacacataatttttaaaacgttaactgagaatttctacaaatctgtattttcagaaaataatttccaaagttctaccattaacgtatgcaagaaatataatcaagaaaaaaatcatttttaattttttctgaaacagccagttttaattattgtacaaatacaactagttttcactaagccatttggcagtaagttagtaacctgatgactaatcgccctgattactttcgtttataatt

SEQ ID NO: 12767 - DNA, 533 bp, Homo sapiens
tgtagtggcttcgtcttcggtttttctcttccttcgctaacgcctcccggctctcgtcagcctcccgccggccgtctccttaacaccgaacaccatgccttcaattaagtcgcagagttctgatggagagatatttgaagttgatgtggaaattgccaaacaatctgtgactattaagaccatgttggaagatttgggaatggatgatgaaggagatgatgacccagttcctctaccaaatgtgaatgcagcaatattaaaaaaggtcattcagtggtgcacccaccacaaggatgaccctcctcctcctgaagatgatgagaacaaagaaaagcgaacagatgatatccctgtttgggaccaagaattcctgaaagttgaccaaggaacactttttgaactcattctggctgcaaactacttagacatcaaaggtttgcttgatgttacatgcaagactgttgccaatatgatcaaggggaaaactcctgaggagattcgcaagaccttcaatatcaaaaatgactttactg

SEQ ID NO: 12768 - DNA, 391 bp, Homo sapiens
cctgtggcgagggcatttgaagccaccggcgttgagtacttcaacacgtttgggggcagcccagtgtcctgcgctgtggggctggccgtcctgaatgtcttggagaaggagcagctccaggatcatgccaccagtgtaggcagcttcctgatgcagctcctcgggcagcaaaaaatcaaacatcccatcgtcggggatgtcaggggtgttgggctcttcattggtgtggatctgatcaaagatgaggccacaaggacaccagcaactgaagaggctgcctacttggtatcaaggctgaaggagaactacgttttgctgaacactgatggccctgggaggaacatcctgaagtttaagcccccaatgtgcttcagcctggacaatgcacggc

SEQ ID NO: 12769 - DNA, 595 bp, Homo sapiens; identical to SEQ ID NO: 1590

SEQ ID NO: 12770 - DNA, 527 bp, Homo sapiens
cactccctgaggcagtggcgacagcggcggcgagaggatgaacaacaagttcgacgctttgaaagatgatgacagtggggaccatgatcagaatgaagaaaacagcacacagaaagatggtgagaaggaaaaaacggaacgagacaagaatcagagcagtagcaagagaaaggctgttgtccctggaccggcagagcatcccctgcagtacaactacactttttggtactccaggagaacccccggccgtcccacgagctcacagagctatgaacagaatatcaaacagattggcacctttgcctctgtggagcagttctggaggttttatagccacatggtacgtcctggggacctgacaggccacagtgacttccatctcttcaaagaaggaattaaacccatgtgggaggatgatgcaaataaaaatggtggcaagtggattattcggctgcggaagggcttggcctcccgttgctgggagaatctcattttggccatgctgggggaacagttcatggttgggg

SEQ ID NO: 12771 - DNA, 499 bp, Homo sapiens
tacggccgggaccccatctctactaaaatacaaaattagctgggcatggtggtgtgtgcctgtaatgctagctactcaggaggctgaggcatgagaatcgcttgaaccggggaggcagaggttgcagtgagccgagatcgcaccactgtactccagcctgggcgacggagtgagactccctctcaaaaaaagaaaaaagccctagcatgtagcaaaagcatttcttggtgagtgtgggggctggtgattcccaccttcaccctgtcatggtctcagggaacagcctgcttcccaccagcagcttgacacccacagtgtgctctggctgctgggagcccatctctcggagaaaccctgtccacccaaccccgagagccctagcgtgcagtcagcgtcagcacggcgctcccagatgagggccggactgcctccccttaagcagctgtgttggaggtactgcccagaccgctgcaggtccctggggatctgcatttctaac

SEQ ID NO: 12772 - DNA, 627 bp, Homo sapiens
ggcagaagaaagaaagaaacctcatcctatattttacaaagcatgtgaattctggcattagctctcataggagacccatgtgcttccttgctcagtgcaaaactgatgattctacttgctgtagatgaatggttaacacgagctagttaaacagtgccattgttttgccagtgaagcctccaaccctaagccactgggacggtggccggagatgccagcagcctctgtcgcccttagtcatataaccaaaatccagaccttatccacaacccggggcttggaaaggaaggtattttggaatcacaccctccggttatgttgctccagtaaaatcttgcctggaaagaggcagtcttcttagcatggtgagctgagttcatggcttttttttgtagccagtcctgtccctggccatccatgtgatggttttggatggagttaaacttgatgccagtgggcagtgcatgtggaaagtatcagagtaagcctctcccctccagagccctgagtttcttggctgcatgaaggttttctttagaatcagaattgtagccagtttctttggccagaaggatgaatacttggatattactgaaagggaggggtggagatgggtgtggcagtgta

SEQ ID NO: 12773 - DNA, 593 bp, Homo sapiens; identical to SEQ ID NO: 1602

SEQ ID NO: 12774 - DNA, 565 bp, Homo sapiens; identical to SEQ ID NO: 1607

SEQ ID NO: 12775 - DNA, 656 bp, Homo sapiens
tacggccgggtgcaatgcaattaaaacataataacggccagacgcggtcgctcacgcctttaatcccagcacttttggaggccgaggtgggtggatcactcgaggtcagaagttcgagaccaggctggccatcacggtgaaaccccatctctactaaaaatactaaaatcagctagtggcatggtggtgcacacctgcgcatggtggcacatgcctgttcctgctacttgggaggctgagtagctcagaccacaagtgcaccccaccatgtccggccaatttccgtattttatgtagagacagggtttcgatttacccacactggtctcaaactcctgggctcaagcgatcctctaacttcagcctcttgagtagctgggactctgagactgcaggagcaccaccacacctgctaacttttagaataaaagaaatttaaattgaatttttaggtcaaaaaatgagtaacagcttagatacaaagaggaatttgcgaattaaaacacagctttgaaaaaattgccctggccgggtgtggtggctcacgtctgtaatcttagcactttgggaggctgagacaggcagatcatgaggtcaggagttcaagaccagcctggctaacatggtgaaacccatctctgcaaaaaaaaaaaaaa

SEQ ID NO: 12776 - DNA, 520 bp, Homo sapiens
aatgctaaaacaggatttccagcccagatactttcccctagtgatgataatgacaatggtgatgaggatgatgatgataactggtagtagaagttggagaatgaaggaaagaaggagaagaaagatgaaaacaataataataacttagatttggagagtagtttacagtttttctaaatgctttctgggttgtagggaggcagggtgttgttctgaggaagagatggtctcaactaaattgttacttgcccaagatcacatatcggatcacatgagagccaaattctagctcatctgactccaaatttagtaactgttccattatacaatcttaaaaaaaaaggaaatggcacttggctttattaaaaatgtacaaataatgttacacttgcgatgagtaagctgcagactatctcagtctgcattatgataatatattctcagcactttttaacattttcttcaattgaattttattctcacactatcactcgcttcttttcctaacctcttttatttt

SEQ ID NO: 12777 - DNA, 509 bp, Homo sapiens
gggggtgtgcccactgagctgacagtggtggaggacgtgactgtgggcaggaggcaggcggtggcgtggctagtggccatgcacaaggctgccaagctcctctatgaatctcgggaccagtaattctacgtggggctgagcttggagtacgtgtggtcaccaggactgagtcgcttggaacagcagagcctgctccttgcgtaccacagggattaatcctgcttgtgctgggaaatgcaactcactcatgtatttggagaaacaggagtgttcacttatctagtgcaatatgttcacagtttgttaatgctttaaacagcttcatgttttagaatttgtgtattgtcaatacttaattggggtgggagagactgagctacactactgctaaactatttttagcataatatataccatttttatgagttcgcaggtctactagaaggttctggcccatcaatattcatttcatttaattcttccacagaaccagtttgggcagtaggaac

SEQ ID NO: 12778 - DNA, 530 bp, Homo sapiens
ctcctaatgacctccggcctagccatgtgatttcacttccactccataacgctcctcatactaggcctactaaccaacacactaaccatataccaatgatggcgcgatgtaacacgagaaagcacataccaaggccaccacacaccacctgtccaaaaaggccttcgatacgggataatcctatttattacctcagaagtttttttcttcgcaggatttttctgagccttttaccactccagcctagcccctaccccccaattaggagggcactggcccccaacaggcatcaccccgctaaatcccctagaagtcccactcctaaacacatccgtattactcgcatcaggagtatcaatcacctgagctcaccatagtctaatagaaaacaaccgaaaccaaataattcaagcactgcttattacaattttactgggtctctattttaccctcctacaagcctcagagtacttcgagtctcccttcaccatttccgacggcatctacggctcaacattttttgtagccac

SEQ ID NO: 12779 - DNA, 661 bp, Homo sapiens
tcggcacgaggcatgggagccgcgcgctctctcccggcgcccacacctgtctgagcggcgcagcgagccgcggcccgggcgggctgctcggcgcggaacagtgctcggcatggcagggattccagggctcctcttccttctcttctttctgctctgtgctgttgggcaagtgagcccttacagtgccccctggaaacccacttggcctgcataccgcctccctgtcggcttgccccagtctaccctcaatttatccaagccagactttggagccgaagccaaattagaagtatcttcttcatgtggaccccagtgtcataagggaactccactgcccacttacgaagaggccaagcaatatctgtcttatgaaacgctctatgccaatggcagccgcacagagacgcaggtgggcatctacatcctcagcagtagtggagatggggcccaacaccgagactcagggtcttcaggaaagtctcgaaggaagcggcagatttatggctatgacagcaggttcagcatttttgggaaggacttcctgctcaactaccctttctcaacatcagtgaagttatccacgggctgcaccggcaccctggtggcagaaaagcatgtcctcacagctgcccactgcatacacgatggaaaaacctatgtg

SEQ ID NO: 12780 - DNA, 405 bp, Homo sapiens
gaagctcttcatctacaacccgaccaccggagaattcctggggcgcaccgccaagaagctggggttggatcttgctcttctacctagttttttatgggttcctggctgcactcttctcattcacgatgtgggttatgcttcagactctcaacgatgaggttccaaaataccgtgaccagattcctagcccaggactcatggtttttccaaaaccagtgaccgcattggaatatacattcagtaggtctgatccaacttcgtatgcagggtacattgaagaccttaagaagtttctaaaaccatatactttagaagaacagaagaacctcacagtctgtcctgatggagcactttttgaacagaagggtccagtttatgttgcatgtcagtttcctatttcattac

SEQ ID NO: 12781 - DNA, 420 bp, Homo sapiens
ggtgcgtttgtggccgtccggcctccctgacatgcagccctctggaccccgaggttggaccctactgtgacacacctaccatgcggacactcttcaacctcctctggcttgccctggcctgcagccctgttcacactaccctgtcaaagtcagatgccaaaaaagccgcctcaaagacgctgctggagaagagtcagttttcagataagccggtgcaagaccggggtttggtggtgacggacctcaaagctgaaagtgtggttcttgagcatcgcagctactgctcggcaaaggcccgggacagacactttgctggggatgtactgggctatgtcactccatggaacagccatggctacgatgtcaccaaggtctttgggagcaagttcacacagatctcacccgtctggctgcagctga

SEQ ID NO: 12782 - DNA, 112 bp, Homo sapiens
tcaatatgcccctcttggcatatcatatttggaggcatatgaatagaccaatgatgaggggcccaggactctatgaccctacaaccatgatgaatgcagatattctagcata

SEQ ID NO: 12783 - DNA, 402 bp, Homo sapiens
  misc_feature 335: n = A,T,C or G
tcggcacgaggaaccgcaccttcgtcctcaacttcatcaagattcccgtggtcccgcacaatgagtgcagcgaggtcatgagcaacatggtgtctgagaacatgctgtgtgcgggcatcctcggggaccggcaggatgcctgcgagggcgacagtggggggcccatggtcgcctccttccacggcacctggttcctggtgggcctggtgagctggggtgagggctgtgggctccttcacaactacggcgtttacaccaaagtcagccgctacctcgactggatccatgggcacatcagagacaaggaagccccccagaagagctgggcaccttancgaccctccctgcagggctgggcttttgcatggcaatggatgggacattaaagggacatgtaacaag

SEQ ID NO: 12784 - DNA, 548 bp, Homo sapiens; identical to SEQ ID NO: 1626

SEQ ID NO: 12785 - DNA, 586 bp, Homo sapiens
ttcggcacgagaactggaagggttgtaggggggtgtgtggcccacccacattcctggccctggcaagtcagtcttaaaacaaggtttggaatgcacttctgtggaggcaccttgatatccccagagtgggtgttgactgctgcccactgcttggagaagtccccaaggccttcatcctacaaggtcatcctgggtgcacaccaagaagtgaatctcgaaccgcatgttcaggaaatagaagtgtctaggctgttcttggagcccacacgaaaagatattgccttgctaaagctaaccagtcctgccgtcatcactgacaaagtaatcccagcttgtctgccatccccaaattatgtggtcgctgaccggaccgaatgtttcatcactggctggggagaaacccaaggtacttttggagctggccttctcaaggaagcccagctccctgtgattgagaataaagtgtgcaatcgctatgagtttctgaatggaagagtccaatccaccgaactctgtgctgggcatttggccggaagcactgacagttgccaaggtgacagtggaggtcctctggtttgcttcgaga

SEQ ID NO: 12786 - DNA, 435 bp, Homo sapiens
tcggcacgagggggttgctggggccacgggtgctgtcctggagccgagagctgccttgcgcttggcgcgccctgcacacctccccggtctgcgccaagaaccgggcggcccgagtacgcgtaagcaagggggacaagccggtgacctacgaggaggcacacgcgccgcactacatcgcccaccgtaaaggctggctgtcgctgcacacaggtaacctggatggagaggaccatgccgcaaagcgaacggtggaggatgttttccttcgcaagttcatgtggggtaccttcccaggctgcctggctgaccagctggttttaaagcgccggggtaaccagttggagatctgtgccgtggtcctgaggcagttgtctccacacaagtactacttcctcgtgggctacagtgaaactttgctgtcctacttttacaaat

SEQ ID NO: 12787 - DNA, 605 bp, Homo sapiens
gctaaaattaaccctcactaaagggaataagcttgcggccgccatcccccggcgccatgcacccctggagcagctggttcgccagggctccttccgtgggttcccagcactcagccagaagaactcgcctttcaaacggcagctgagcctacggctgaatgagctgccatccacgctgcagcgccgcactgacttccaggtgaagggcacagtgcctgagatggagcctcctggtgccggcgacagtgacagcatcaacgctctgtgcacacagatcagttcatcttttgccagtgctggagcgccagcaccagggccaccacctgccacaacagggacttctgcctggggtgagccctccgtgccccctgcagctgccttccagcctgggcacaagcggacaccttcagaggctgagcgatggctggaggaggtgtcacaggtggccaaggcccagcagcagcagcagcagcaacagcaacagcagcagcagcagcagcagcaacagcagcaagcagcctcagtggccccagtgcccaccatgcctcctgccctgcagcctttccccgcccccgtggggccctttgacgctgcacctgcccaag

SEQ ID NO: 12788 - DNA, 116 bp, Homo sapiens
aaaatgaaatctatggttgcaccagataatagactatgtcctgattgtgattgacaatccaaccgaataagccactctcttggactacctgtgtcattccttaatttaatgccccc

SEQ ID NO: 12789 - DNA, 449 bp, Homo sapiens
cggtaggaaacgtctcgttgacagctcagagcttaaaaaaaatatatacacatatataaaaaacacttctgccccctcccccatgaacgggtccaggcagctccttcctgcagggggcagggggagagggccaccagggcagtgctcgttttcttgaaggcaccgaccctcctcctccccatgttccctgcctccagttccaatgcaggggtccaggtggcaggcccctctggaaggaatgggtcttccccaagcttccaccccaccttggattgggccgcagtgtggagggcctcatcaaactctttgggaccccccacccccactctccggtccattgtccatgccggaaccgcaagtgcagaagtgggtggggtgggccaggctggtccggtgctggcttagtctgatagttgctgtccctggaggaggacccccaagggctgatg

SEQ ID NO: 12790 - DNA, 577 bp, Homo sapiens
gggtctcctgccccagcgggccggctgcctaccctccagactgtccgctatggctccaaggctgttacccgccaccgtcgtgtgatgcactttcagcggcagaagctgatggctgtgactgaatatatccccccgaaaccagccatccacccatcatgcctgccatctcctcccagccccccacaggaggagataggcctcatcaggcttctccgccgggagatagcagcagttttccaggacaaccgaatgatagccgtctgccagaatgtggctctgagtgcagaggacaagcttcttatgcgacaccagctgcggaaacacaagatcctgatgaagatcttccccaaccaggtcctgaagcccttcctggaggattccaagtaccaaaatctgctgcccctttttgtggggcacaacatgctgctggtcagtgaagagcccaaggtcaaggagatggtacggatcttaaggactgtgccattcctgccgctgctaggtggctgcattgatgacaccatcctcagcaggcagggctttatcaactactccaagctccccagcctgcccctggtgc

SEQ ID NO: 12791 - DNA, 647 bp, Homo sapiens
  misc_feature 520: n = A,T,C or G
ttcggcacgagggaagatgaagagctgaccaacctgaactggctgcacgagagcaagaacttgctgaagagctttggggagtcggtcctcaggagtgtcatctcccgtgccaggtacctgggaagatgacacccccccatcccctgcccactctgacatgccctacgatgccaggcagaaccccaactgcaaacccccctactccttcagctgcctcatatttatggccatcgaggactctccaaccaagcgcctgccagtgaaggatatctacaactggatcttggaacattttccgtattttgcaaatgcacctactgggtggaaaaactcagtgagacacaatttatcattgaataagtgttttaagaaagtggacaaagagaggagtcacagtattgggaaagggtcgttgtggtgcatagacccagagtatagacaaaatctaattcaggctttgaaaaagacaccttatcacccacacccacacgtgttcaatacacctcccacctgtcctcangcatatcaaagcacatcaggtccacccatctggccgggcagtaccttcttcaagagaaatggagcccttctccaagatcctgacattgatgctgccagtgccatgatgcttttgaatactccccctg

SEQ ID NO: 12792 - DNA, 578 bp, Homo sapiens; identical to SEQ ID NO: 1636

SEQ ID NO: 12793 - DNA, 410 bp, Homo sapiens
catcgcctctgaggccctctgggggaaaagctccgtctccccgagcctggacacttgggccacatggctgtcctttgccaacgctgtctgccaccccctgatctatggactctggaacaagacacttcgcaaagaactactgggcatgtgctttggagaccggtattatcgggaaccatttgggcaacgacagacgacttccatgctcttcaacatttccaacaggatcacagacctgggcctgtccccacacctcactgcgctcatggcaggaggacagcccctggggcacaacaccagcacgggggacactggcttcagctgctcccacgactcacggacagatatgatgctgcttgaggactactcgtctgatgacaaccctgcctcttactgcacttgcccaccca

SEQ ID NO: 12794 - DNA, 504 bp, Homo sapiens
cggcacgaggaaaagctgggattacaggggtgagccaccgtgcccaacctcacttgcttcttatccttacactcccccagccccagagaaactgccacatacaccacaaaaaccaaacatcccccaatgaccttagccccattgctccattcactcccaggtgagaattcaggcaaacgtccacaaaggtcacaggcagcgtacatacggttctgttataccccatatattaccccttcatgtcctaaagaagacattttctcttagagattttcattttagtgtatctttaaaaaaaaatcttgtgttaacttgcctccatctttttcttgggtgaggacacccaggaatgacccttttgtgtctatgatgttgctgttcacagcttttcttgataggcctagtacaatcttgggaacagggttactgtatactgaaggtctgacagtagctcttaaactcgcctatcttaagtagtcatgctgtgcattttttttttcattg

SEQ ID NO: 12795 - DNA, 483 bp, Homo sapiens
ttcggcacgagggggccagctgccctctggctctggctgtggctcccgcctgtccggcagggcccagggccagcgtcgggcacagggcagctcccactggtctcggcaacacacccagccgcctggtacttcctccagcccctcccagtcagccctcccgtcctcggggcccctgcagccacccaacgtcacctccagcccggtctcacccatggtccagtctcccagcagcagcaacatccccacgcagccccccagcaagtcctctggcaagccggaggacgcagcccccaagaccagcggacagcgccagaaggaatcgtcgaaacagcctgccagcagcgcctcagtgcccgagctggtcccctgccattccgggacctctctggagtacacttcggagtccaccaccgagatcacctgcagctggccacaccacaggcccccgtgcctgcagcactactggtgcctgaaacacctggc

SEQ ID NO: 12796 - DNA, 140 bp, Homo sapiens; identical to SEQ ID NO: 979

SEQ ID NO: 12797 - DNA, 64 bp, Homo sapiens
tcggcacgaggctgaattgcggccgtatgcgcggctctgtggagtgcacctggggttgggggca

SEQ ID NO: 12798 - DNA, 611 bp, Homo sapiens
acagaggggcttttggctctctgaccagcaccatggcggttggcaagaacaagcgccttacgaaaggcggcaaaaagggagccaagaagaaagtggttgatccattttctaagaaagattggtatgatgtgaaagcacctgctaagttcaatataagaaatattggaaagacgctcgtcaccaggacccaaggaaccaaaattgcatctgatggtctcaagggtcgtgtgtttgaagtgagtcttgctgatttgcagaatgatgaagttgcatttagaaaattcaagctgattactgaagatgttcagggtaaaaactgcctgactaacttccatggcatggatcttacccgtgacaaaatgtgttccatggtcaaaaaatggcagacaatgattgaagctcacgttgatgtcaagactaccgatggttacttgcttcgtctgttctgtgttggttttactaaaaaacgcaacaatcagatacggaagacctcttatgctcagcaccaacaggtccgccaaatccggaagaagatgatggaaatcatgacccgagaggtgcagacaaatgacttgaaagaagtggtcaataaattgattccagacagcatt

SEQ ID NO: 12799 - DNA, 543 bp, Homo sapiens
acaaccagattgaaacaatggaggatctttgtgtggcaaacacactctttgccctcaatttattcaagcatctggcaaaagcaagccccacccagaacctcttcctctccccatggagcatctcgtccaccatggccatggtctacatgggctccaggggcagcaccgaagaccagatggccaaggtgcttcagtttaatgaagtgggagccaatgcagttacccccatgactccagagaactttaccagctgtgggttcatgcagcagatccagaagggtagttatcctgatgcgattttgcaggcacaagctgcagataaaatccattcatccttccgctctctcagctctgcaatcaatgcatccacagggaattatttactggaaagtgtcaataagctgtttggtgagaagtctgcgagcttccgggaagaatatattcgactctgtcagaaatattactcctcagaaccccaggcagtagacttcctagaatgtgcagaagaagctagaaaaaagattaattcctgggtcaagactc

SEQ ID NO: 12800 - DNA, 567 bp, Homo sapiens
cggcaccctgcttcaacagtgcttggacggaacccggcgctcgttccccaccccggccggccgcccatagccagccctccgtcacctcttcaccgcaccctcggactgccccaaggcccccgccgccgctccagcgccgcgcaaccaccgccgccgccgccgcctctccttaatcgccgccatgacgaccgcgtccacctcgcaggtgcgccagaactaccaccaggactcagaggccgccatcaaccgccagatcaacctggagctctacgcctcctacgtttacctgtccatgtcttactactttgaccgcgatgatgtggctttgaagaactttgccaaatactttcttcaccaatctcatgaggagagggaacatgctgagaaactgatgaagctgcagaaccaacgaggtggccgaatcttccttcaagatatcaagaaaccagactgtgatgactgggacagcgggctgaatgcaatggagtgtgcattacatttggaaaaaaatgtgaatcagtcactactggaactgcacaaactggccactgacaaaaatgaccccca

SEQ ID NO: 12801 - DNA, 553 bp, Homo sapiens
actagtggatcccccgggctgcaggaattcggcacgagggagaaggagcagatcaagaccctcaacaacaagtttgcctccttcatagacaaggtacggttcctggagcagcagaacaagatgctggagaccaagtggagcctcctgcagcagcagaagacggctcgaagcaacatggacaacatgttcgagagctacatcaacaaccttaggcggcagctggagactctgggccaggagaagctgaagctggaggcggagcttggcaacatgcaggggctggtggaggacttcaagaacaagtatgaggatgagatcaataagcgtacagagatggagaacgaatttgtcctcatcaagaaggatgtggatgaagcttacatgaacaaggtagagctggagtctcgcctggaagggctgaccgacgagatcaacttcctcaggcagctatatgaagaggagatccgggagctgcagtcccagatctcggacacatctgtggtgctgtccatggacaacagccgctccctggacatggacagcatcattgctg

SEQ ID NO: 12802 - DNA, 495 bp, Homo sapiens
  misc_feature 45: n = A,T,C or G
ttcggcacgagcagcccgctgaggagctttcttgggctgcccccnatctctcccaacaaggtgtacatattctgcgtagatgctagaccaaccagcttcccagggttcgtcgctgtgaggcgtaagggacatgaattctagggtctcctttctccttatttattcttgtggctacatcatccctggctgtggatagtgcttttgtgtagcaaatgctccctccttaaggttatagggctccctgagtttgggagtgtggaagtactacttaactgtctgtcctgcttggctgtcgttatcgttttctggtgatgttgtgctaacaataagcagtacacgggtttatttctgtggcctgagaaggaagggacctccacgacaggtgggctgggtgcgatcgccggctgtttggcatgttcccaccgggagtgccgggcaggagcatggggtgcttggttgtttccttcctaataaaataaacgcgggtcgccatgc

SEQ ID NO: 12803 - DNA, 501 bp, Homo sapiens
tcggcacgaggataataagtaataaactggaacttatagcataattaccaggatagtgggagaaatctgaaaccatatcatatggaaaatggtgaaggctctagtaatatttattgcatgctgttgacaccaatttaaaagttatctttaaatacttgaagagttatgtaaagattagatttttgactcaatatacaacaaattgtaaattctattacaaaaatagaatatactgtcttataagtcctcttctattaatattattattaaaacagaactaaatggaagggtggtaattaataaagattcaagctaacgtatggggcccggcatgttggctcatgcctgtaatcccagcctgaccaacatgaggttgaagcgggcagatcacttgaggtcacgagtttgagaccagcctgaccaacatggtgaaatcccatctctactaaaaatacaaaattagctgggcatggtggtgcacgcccataatcccagctactc

SEQ ID NO: 12804 - DNA, 658 bp, Homo sapiens
  misc_feature 506, 599: n = A,T,C or G
cggcacgaggctgaccaggccctgggcctcagcgaccacccctccccctcctgcctggacccagggagcaggtgcagggggctccgagcccctggtgactgtcaccgtgcagtgcgccttcacagtggccctgagggcacgaagaggagccgacctgtccagcctgcgggcactgctgggccaagccctccctcaccaggcccagcttgggcaactcaggtgggccagaaagcccccggtggctgcggtggagctgggcaccgccccgactgaggcagctgctggaagagggggtggcagaggtcactgccctccctgcaggccccacccaggaggccccctctgaggaatctctttgcagttacctagccccaggtgaggacgggcactgggtccccatccccgaggaggagtcgctgcagaaggcctggcaggacgcagctgcctgccccagggggctgcagctgcagtgcaggggagccgggggtcggccggtcctctaccangtggtggcccagcacagctactccgcccaggggccagaagacctgggcttccgacagggggacacggtggacgtcctgtgtgaagtggaccangcatggctggagggccactgtgacggccgcatcggcatcttccccaagtgcttcgtggt

SEQ ID NO: 12805 - DNA, 258 bp, Homo sapiens
atgtaacccctgggccctggcttaaaccgacactcctgacctctgtgttcaccctgagggctgacttgaagcccgctacccactctgaggctcctaagaggtaccatgcttgccactctggggcctgcccctgcctaacagtctcccagctcccaacagcctggggaagctctgcacagagtgacctgagaccaggtacaggaaacctgtagctcaatcagtgtctctataactgcataagcaataagatcttaataa

SEQ ID NO: 12806 - DNA, 350 bp, Homo sapiens
gagaagacgacagaagggctacatatttgttaggcactttacctatgatatttgcttttcagaattctgggaaattgtaattataagccccattttatagaaaaaggaaccaaagctagaaatgcaggaccaaaatttgaacccaggtgagcctgagctcaccaatcctaagcttctccacactgcacgcttgaacctctggaaagaacacgaggcacacctccctatcattccactccaagaaaaggagttctgaacaagccacggctcaactggatcacaattccagagggaggagttttcaatggaaggtaaaaaaaaaaaaaaaaaaaaaaaaaaagtcgtatcga

SEQ ID NO: 12807 - DNA, 278 bp, Homo sapiens
gagaagacgacagaaggggttcaacatcacttgggtctggggtggctcctcatcagcacacagagacccataaggccagataagaggctgtctctctaactagtactttaggagggcagccacaaagatgatggcttctggcatctttcatggagacaggccagcaccacggtaacttgatgagacatactcctgtcacacctaataaatttgccagcctgtcatcctcttctctttcaaaaaaaaaaaaaaaaaaaaaaaaaaaaagtcgtatcgat

SEQ ID NO: 12808 - DNA, 481 bp, Homo sapiens
tcgcgcgcctgcagggtcgacactagtggatccaaagaattcggcacgagcaggccttgctcaccaccataagcacaggggtcaacataggcagggtcacccaaagaaccgagatatgccagcaagtgaagatttacaagatttacaaaagaagctctgtcgaaagagatgtataaatcacttactctgtaaattgcccacagattcatagttggctcctatgagctgatgctgccattggcgacatctgatatttgaaaaaacagggtctgcactcacctgacagtgtaaagaaaacctcccatctttatgtagctgacagggacttcgggcagaggagaacataactgaatcttgtcagtgacgtttgcctccagctgcctgacaaataagtcagcagcttatacccacagaagccagtgccagttgacgctgagagaatcaggcaaaaaagtgagaatgaccttcaaactaaatattt

SEQ ID NO: 12809 - DNA, 98 bp, Homo sapiens
ttttggctctactttgcagggaatctggcatcgggtggtgccgcaggggccacatccctgtgttttgtgtaccctcttgattttgcccgtacccgtct

SEQ ID NO: 12810 - DNA, 319 bp, Homo sapiens
ttcggcacgaggcttttttttttttttttttcccccccccacctttttgggaatagttaaaaatacctttttttttttcaaggactcaaggggcttttcccttcggcttttaaaaaccggtttccggcaaaggaaccccggtggtttaggggatttagtttccaaaaataccttttggtttttgggaaaaaggctttttttggaattcccggaaaacccccaaattatgcaacctcggaccttggaggttacctcggggtttaaaattaagccttgaaaaaaaaggggtttaaacccttggccatccccttttttgggc

SEQ ID NO: 12811 - DNA, 644 bp, Homo sapiens
gatttttttttcaattttatttgagccaaaatatatatacttaattttagttatgccagaagtaagtataatttctcagtccaaggatgttaggaagcaacttacagagcatgcttcaaatagaattctcttggcctttgaaggtaactattttcaaacttaatagtagagtcaagcaagaatggacaattagagttttcaaaattgaaaaatattatgtattttatataatcattacctatggtttacagattttatttttatgatacatatctctaagtagtggtacactgaggacatagcaaatatgcaataaatacttattaagctgaagtgaactaacaaaaaccattaattacaccatttctaacaaccaaaccagctattgcttttcagtgttttggtgatacgttggagtaggaagtcatattcaaattggttagatccttggaagaaatagtagtatttgtttttagagtagaagactgcatcaattttaggcccgattccttggaagttcttggtaatcagtttgggataacagggtccatcatctgtctcctttcatcatacctccaatactggttatctacaaagaagtagggtctataaaaacgtgggttaaaaacagctgcatcaatttt

SEQ ID NO: 12812 - DNA, 658 bp, Homo sapiens
  misc_feature 536: n = A,T,C or G
catgccacttctgtggtggctccctcatcaacgaacagtgggtggtatcagcaggccactgctacaagtcccgcatccaggtgagactgggagagcacaacatcgaagtcctggaggggaatgagcagttcatcaatgcagccaagatcatccgccacccccaatacgacaggaagactctgaacaatgacatcatgttaatcaagctctcctcacgtgcagtaatcaacgcccgcgtgtccaccatctctctgcccaccgcccctccagccactggcacgaagtgcctcatctctggctggggcaacactgcgagctctggcgccgactacccagacgagctgcagtgcctggatgctcctgtgctgagccaggctaagtgtgaagcctcctaccctggaaagattaccagcaacatgttctgtgtgggcttccttgagggaggcaaggattcatgtcagggtgattctggtggccctgtggtctgcaatggacagctccaaggagttgtctcctggggtgatggctgtgcccanaagaacaagcctggagtctacaccaaggtctacaactatgtgaaatggattaagaacaccatagctgccaatagctaaagcccccagtatctcttcagtctctataccaataaagtgaccct

SEQ ID NO: 12813 - DNA, 418 bp, Homo sapiens
  misc_feature 136, 379, 400, 412: n = A,T,C or G
gcgaaaaattacgaagagattgcaaaagttgagaagctcaaaccattagaggtagagctgcgacgcctagaagacctttcagaatctattgttaatgattttgcctacatgaagaagagagaagaggagatgcgtnataccaacgagtcaacaaacactcgggtcctatacttcagcatcttttcaatgttttgtctcattggactagctacctggcaggtcttctacctgcgacgcttcttcaaggccaagaaattgattgagtaatgaatgaggcatattctcctcccaccttgtacctcagccagcagaacatcgctgggacgtgcctggcctaaggcattcctaccaacagcaccattcaaggcacgttgggagntttcttgccagaactggattntcttttggtgtngggagg

SEQ ID NO: 12814 - DNA, 474 bp, Homo sapiens; identical to SEQ ID NO: 1684

SEQ ID NO: 12815 - DNA, 153 bp, Homo sapiens
tcggcacgagggcctgtaatcccagctaaccatgagctgaggcaagacaatcacttgggcccgggaggcaaggttgcactgagccgaaccatgccactgactccggcctgggtgacaggcaagacttgtctcaaaaaaaaaaaaaaaattccc

SEQ ID NO: 12816 - DNA, 507 bp, Homo sapiens
ttcggcacgaggctgaagtgggttggccaggaggttcccccgaccggttggggagacttggggccagcgcttctggtctggtaaatatgtatgatgtgttgtgcttttttaaccaaggaggggccagtggattcccacagcacaaccggtcccttccatgccctgggatgcctcaccacacccaggtctcttcctttgctctgaggtcccttcaaggcctccccaatccaggccaaagccccatgtgccttgtccaggaactgcctgggccatgcgaggggccagcagagggcgccaccaccacctgacggctggggacccacccagcccctctcccctctctgctccagactcacttgccattgccaggagatggccccaacaagcaccccgcttttgcagcagaggagctgagttggcagaccgggcccccctgaaccgcaccccatcccaccagccccggccttgctttgtctggcctcacgtgtctcaaattttctaagaacc

SEQ ID NO: 12817 - DNA, 535 bp, Homo sapiens
tcggcacgaggcctcgtgccgagctgggctctactcctgagtgagtctagtgggcttgggggtgtccatgtggtgctgtcccttggcagggtcagggcagctgctagggtgggaccagcagttggggtctgcagcgtggagatgggcaggaagctggagcccggctcatcgtcgcatagcctgcctgcacccgccccccgccaccacctcctggtgggttccgccctcatgccccacctctccctgcagcgggacctggacttcaccatcgacctggacttcaagggccagctgtgcgagctgtcctgctccaccgactaccggatgcgctgaggcccggctctcccgccctgcacgagcccaggggctgagcgttcctaggcggtttcggggctcccccttcctctccctccctcccgcaaaagggggttttaggggcctgggctggggggatggggagggcacatcgtgactgtgtttttcataacttatgtttttatatggttgcatttacgccaataaatcctcagctggg

SEQ ID NO: 12818 - DNA, 459 bp, Homo sapiens
tcggcacgaggtgtgggtaaaatttgaaaattgaatttataataacaattctacattttaaaccctattgccactttatgcatcctcaatgaaatggactgaaggctaatatgcttgctttatttacttttgtaatcttggattttgtaacttttaaaactagaaaccattggtctaacaaatcatgcaactgtattctataaacacaactttattaagcagaatacactgtagatgcttttccccaacatatctggctggcagtctttgtcgttgttcattctggggataaaggggaactacgctagcaattctaatgtgacattctttaagcatatcttaaaatagtatttaagtaaatggtctaatttctacataattattgcactgaacttttttgtttattaaggtgtttaaataagctcagctaattcaatacactgtactcacttgtgcatc

SEQ ID NO: 12819 - DNA, 545 bp, Homo sapiens
tcggcacgaggcaatttcagagataccaccagggattgggctgcttactagacttcaggaactgattctcagctacaacaaaatcaagactgtccccaaggaactaagtaattgtgccagcttggagaaactagaactggctgttaacagagatatatgtgatcttccacaagagctcagcaatctgctaaaacttactcaccttgatctgagtatgaacgattttactacaatccctcttgctgtgttgaacatgcctgcccttgagtggctggacatgggaagcaacaaacttgaacaacttcctgatactatagaaagaatgcaaaatctacatacgttatggctgcaacgaaatgaaataacatgcttgcctcaaacaatcagcaatatgaaaaatctgggtactcttgttctcagcaacaataaactgcaagatattccagtatgcatggaagaaatggcaaatctgaggtttgtcaacttcagagacaacccactgaaattgaaagtatcacttcctcccagtgaaggcacagatgaag

SEQ ID NO: 12820 - DNA, 118 bp, Homo sapiens; identical to SEQ ID NO: 275

SEQ ID NO: 12821 - DNA, 197 bp, Homo sapiens
gaagctggtacgcctgcaggtaccggtccggaattcccgggtcgacatcatcatcatgatcgctcgacatcgatacgacttttttttttttttttttttttttggggggaaaaggggaacccctttttttttttggggggcccaatttaaccggggggccaaaaaaaaatttttttttaaaaccccggggggggggg

SEQ ID NO: 12822 - DNA, 140 bp, Homo sapiens
attcggcacgaggtaaaacctgaggagaaggagaccacagagaatgtacaacagacagtgagtgctaaaggcccccctgaaaaacggatgagacttgagtgagtactggacaaaagataagcctggaagactcctcatgc

SEQ ID NO: 12823 - DNA, 413 bp, Homo sapiens
attcggcacgagccctgggtctaggaatcctggctctacagcatgacttggtgatcctgtgcaagtcttttaacctctccacaccagggctgcgctggtccagcaggattccctatcagggagaggggacttactaaaaccatctggagagcatgtctgcaaactacagtgggccagcctctgcccagagagcctgaagttgctcacttgcaaggaagaggtgcagagcattgcaatctgctaccacacctctcacacctggtgagaatcagttctgatctccaaggttctgacctctgagagtgacgttaagtccagagagccacaccactacaccctgagagaccttcagcaaaaggcccgtgagctcaaagaaattggggtcaggatgcttttaaagcaaaaaatgcttt

SEQ ID NO: 12824 - DNA, 588 bp, Homo sapiens
tgaacaactgatcgaagctatcaacaatggggactttgaagcctacacaaaaatctgtgacccaggccttactgcttttgaacctgaagctttgggtaatttagtggaagggatggattttcaccgattctactttgaaaatgctttgtccaaaagcaataaaccaatccacactattattctaaaccctcatgtacatctggtaggggatgatgccgcctgcatagcatatattaggctcacacagtacatggatggcagtggaatgccaaagacaatgcagtcagaagagactcgtgtgtggcaccgccgggatggaaagtgggagaatgttcattttcatcgctcggggtcaccaacagtacccatcaagtaaatatttccaggctgtcagcttctttgttaatacacccatgctaaatttcaacagtgccgcatctgcattctctgttctcaaggcacctggatggtgaccctgggccgtcctctcctcctcttcatgcatgtttctgagtgcatgaagttgtgaaggtcctacatgtaatgcatatgtgatgcatcatcttatcatatattccttcctataca

SEQ ID NO: 12825 - DNA, 441 bp, Homo sapiens
tttgtttttagatatttttcctataggtttctgctgtggagccgtactcactgcagaccctgaaggaggaggagcacctgctttctgccactcagtgcgctcagctgccattcttctcacatatgcatcatccacacacatcaagatattttccggctttatgtcagtatgaatgatcttgcacttactgtgtaagtaatctaacccttgaaggacctgtcgaatgatactcttcacacaacgtactgggaggccttgatagttggatttgatgatccacttgaggagatggtggccaagtacttcgaagaccatgcagacatgtatcccattcatgcctgaaatcttgaagtcgtcaatgagctggaccaccatgtctttgtttgggtcactgggatcactttctcgaacacatttgagcaattttatttcatcaaggct

SEQ ID NO: 12826 - DNA, 603 bp, Homo sapiens
tggatcccccgggctgcaggaattcggcacgagctgtacacttttcctgggtggtctcatccattcctttgctttttcataccatttatttgttaatgattcccacatttatttatgcacttggagagctcacaggaatctcagaaactgatgaggtacaattctgaaccctcagtctcttccctttaaacctttctttttctctactttaatttttctaaagagtgtcttgctatgttgcccaggctggtctccaactcaagtgatcctcctgccgcagtctcccgaagtgctgggattactgacatgagccaccacactcagccctttaaacctttccctggcctttcccatagctggtgaaggacacctccatccattccacccagttgctcaaagcagaaattttcagtgcaagtcttgatgctgcgccgtcccccactccctacatcagaacgcatccctcatctggactccagcggtggcttcttgatgctgcgcggtcccccactccctacatcagaatgcatcccgcatccagactccagcggtggcgctctacctgcacgctgttgccaagtccaagctaccatactcctgcct

SEQ ID NO: 12827 - DNA, 266 bp, Homo sapiens; identical to SEQ ID NO: 1716

SEQ ID NO: 12828 - DNA, 415 bp, Homo sapiens; identical to SEQ ID NO: 6453
  misc_feature 2, 4, 112, 237, 270, 370, 407: n = A,T,C or G

SEQ ID NO: 12829 - DNA, 543 bp, Homo sapiens; identical to SEQ ID NO: 1722
  misc_feature 465: n = A,T,C or G

SEQ ID NO: 12830 - DNA, 299 bp, Homo sapiens
caagactgcgggaaaccccccctaaactgacacctgcccttcctagaattggaaggcacctatgaggaaaatgagcgggcactggagagtaaggcagcccacttggacgggttggaggccaggatgcgcagcgtgcttcaagccatcaacttgcaggtgcagatctacaacacctgccagtgacccctgcccaaggcctaccccagttcctagcactgccccacatgcatgtctgcctatgcactgaagagctcttggcccggcagggcccccaataaaccagtgtgaacccccaaaag

SEQ ID NO: 12831 - DNA, 532 bp, Homo sapiens
tcggcacgagggacaaacaaaactcacaaatgaatgcttctcacccggaaacaaacttgccagttgggtatcctcctcagtatccaccgacagcattccaaggacctccaggatatagtggctaccctgggccccaggtcagctacccacccccaccagccggccattcaggtcctggcccagctggctttcctgtcccaaatcagccagtgtataatcagccagtatataatcagccagttggagctgcaggggtaccatggatgccagcgccacagcctccattaaactgtccacctggattagaatatttaagtcagatagatcagatactgattcatcagcaaattgaacttctggaagttttaacaggttttgaaactaataacaaatatgaaattaagaacagctttggacagagggtttactttgcagcggaagatactgattgctgtacccgaaattgctgtgggccatctagaccttttaccttgaggattattgataatatgggtcaagaagtcataactct

SEQ ID NO: 12832 - DNA, 648 bp, Homo sapiens
  misc_feature 203, 357: n = A,T,C or G
tcggcacgaggccggttgctctcaacatggtcctacctgatgagaagggtgcgggggcccttcccttcctaccaggggtctttggctacgcagtgaatcctcaagcagcaccccctgccccaccaacaccacctcccccaactcttcctccaccaattccccctaagggagaaggggaaagggcaggggttgagagaacccanaagggcgatgtggggtgaaccctggggctcaatccccctttcaccagatgccaccctccctgaaccccccaccactaccagctccctggcctccctgccccttgggagccccttcacactcttgtgcagggacttgggggcccctggagctcangggtcaggctgctttgtgtgagatgtagttttcccatctcctgggaagggatctttcgaggttcccctctcagtcttcctccagggaatggcctccatgaggggcagggccagcttccatcccttctccagcccttggggcaactgagcaatatacttaacctgaatctctactcacagcccccaccagctctgaatgtctaacctgctcccctgattcgtaaacctaagggaaaccatctctctcacctaatgacccgccttgttctgaagctttctctaagcccttccc

SEQ ID NO: 12833 - DNA, 534 bp, Homo sapiens
  misc_feature 379, 433: n = A,T,C or G
tcggcacgaggggatatccttcacttcaaaaagcttcataaagtcaggtccttctgtacctcccttagtgaatccacctctgcctacaacttttcaaccaggagctcctcatgggccccctccagctggaggcccacccccagtgagggccctcacgcccctgacatcatcatatagagatgtaccccagcccttatttaattcagctgtcaaccaagaaggtaagtgaaccaagaaacaaagtcaaatcctcaagttttgacttagggtagaaagatgaatattagctgaattctgtgcattaaaatcacattttttccagaaaatctagttttggttagggatgggctacaggaatttacaatttaaagttcctcangaattccattgccatccgctgggctgtgactaccattgggaaaaaagctcttantgttttgttactttttttgttgctatgcggattttttaaaaatcatggctataaagtcaggtggcttttggaggagaattactacttttcttgacatgatg

SEQ ID NO: 12834 - DNA, 611 bp, Homo sapiens
  misc_feature 418: n = A,T,C or G
tcggcacgaggagtacagctttatggcggtcatccactttgcggggctcaaggccgtgggcgagtcggtgcagaagcctctggattattacagagttaacctgaccgggaccatccagcttctggagatcatgaaggcccacggggtgaagaacctggtgttcagcagctcagccactgtgtacgggaacccccagtacctgccccttgatgaggcccaccccacgggtggttgtaccaacccttacggcaagtccaagttcttcatcgaggaaatgatccgggacctgtgccaggcagacaagacttggaacgcagtgctgctgcgctatttcaaccccacaggtgcccatgcctctggctgcattggtgaggatccccagggcatacccaacaacctcatgccttatgtctcccangtggcgatcgggcgacgggaggccctgaatgtctttggcaatgactatgacacagaggatggcacaggtgtccgggattacatccatgtcgtggatctggccaagggccacattgcagccttaaggaagctgaaagaacagtgtggctgccggatctacaacctgggcacgggcacaggctattcagtgctgc

SEQ ID NO: 12835 - DNA, 563 bp, Homo sapiens
catgtgaagacatcaatgagtgcagcagcagcccctgtagccaggagtgtgccaacgtctacggctcctaccagtgttactgccggcgaggctaccagctcagcgatgtggatggagtcacctgtgaagacatcgacgagtgcgccctgcccaccgggggccacatctgctcctaccgctgcatcaacatccctggaagcttccagtgcagctgcccctcgtctggctacaggctggcccccaatggccgcaactgccaagacattgatgagtgtgtgactggcatccacaactgctccatcaacgagacctgcttcaacatccagggcggcttccgctgcctggccttcgagtgccctgagaactaccgccgctccgcagccacgctccagcaggagaagacagacacggtccgctgcatcaagtcctgccgccccaacgatgtcacatgcgtgttcgaccccgtgcacaccatctcccacaccgtcatctcgctgcctaccttccgcgagttcacccgccctgaagagatcatcttcctccgggccatcacgccaccgcat

SEQ ID NO: 12836 - DNA, 491 bp, Homo sapiens
aactaactttatttctctggaagaagcaggtactgaatgccggagcagcaacttcgccaacaggctggtgggaaaacatggaaccgcgtgggggaattgggtggaagaagaagcactgatgtccctccagggcggctgccccttggtctccttccagccctggggccttgggccctggtccccgccagagaatggtctggcaccctttctccgcttcctgagccacctcaggctatttccaggcacaagatcctgaggccagccaagtcccattcaagtccatggtaaggccacaagtcacattctgcccgacaccccagctgctgccaggggccccctggaagaaggcccagtcctaggaggtcccaccgggtgccggtccgcctctccctgtggccaacacatcccgcctgcccaggtccagcctggtttcctcccagtctgtcacccagggcagggcctgggggtactactccacccacaggccccgc

SEQ ID NO: 12837 - DNA, 522 bp, Homo sapiens
gcggccgcgttcccggtgctccagcacctggccgcctccgccgacttctgcagcctcgatacaaagctctctacgtcgtcgaacacgtggttcaggatgtccacttcccgctccgcctgcagaaccgccagtcaaggaccccggggacccaggtccggggaggccgagtcagcgttgctcgaggtccccaccggctcaggcctctgcgcctcctctgcctcgggaatgggcttcgctggggtcgtccgcggcccggccccgctctacggtgctgatcactgcgcggactgacgggcggcgctgcaggggcggggtctcagcggcgggcgagcggtcgcgctgcaactcctcctgcgtggccctgagcgccgccgccctgcgctccccgcggcccgagcggtaattgtgcagagccccctggatgtcctctcggatcagctccgccccgagggccaggacctggaagaagtgcacgtcgtgctgcgcgcgctcgggttcctggcacacgagcagcagcaacga

SEQ ID NO: 12838 - DNA, 544 bp, Homo sapiens
  misc_feature 80: n = A,T,C or G
ttcggcacgaggcgcccgctgagacccggagcccgcgtccgcatccaacaggaagggaagaaacacattctggtgcttancgagctgcgcgccgaggacgccggtgaagtccgcttccaggcggggcccgcccagtccctggctctactggaagtggaggcattgcctctccagatgtgccgccacccccctcgcgagaagaccgttctggtgggccgccgggcggtgctggaggtgactgtgtcccgctcggggggccacgtgtgctggctgcgggagggggccgagctgtgcccgggagataagtatgagatgcgcagccacggccccacccacagcctggtcatccatgacgttcgacctgaggaccaaggcacttactgctgccaggccggccaggacagcacccacacacggctgctggtagagggcaactaggagaacctaaccaggccaggcgggtgcccttggacagcttggaaggcgtttgcccttaccctgggcaggggtagagagacaaggaacaataaaagtgctacagctc

SEQ ID NO: 12839 - DNA, 493 bp, Homo sapiens
tcggcacgaggcaaactgtagatggtagctaatttttctttacctattttctaatgtcatgattcctgtttgcccaatggatcatttgtatgttaaccactgtatgtaaccaacccttatctggcaacataattgcagcacaataatgatttgcatgataccttgaaattggggggagggggcatgccaagttgggcatcactttgtcttaacaattaatgggatattgattactaaaataagttaatattaagcaaggtgccggttgtacaatctctgatcagtgtcttttcagcactttgagcatttacttggctcatttagtcttccttttgtagcgcatggttgggaggaaaaagtgcatgcatcattccttcactcttctctttttcccgcccccccctcccttcgcacataggcatttggtttgcttccatctttttttatgcagtgcctgtttttttttaaccaattaaaatcccttttgttgatg

SEQ ID NO: 12840 - DNA, 497 bp, Homo sapiens
  misc_feature 353: n = A,T,C or G
caaaagtgttgttttttattttctttcttgggccagctgcagcttccaaccaagaaaacctcaaagcattagggaaggagcaggtgtggggctggggtggggagaatccctcaagctccagggcccagggtctaacctgagaggtcggggctgcaggaagctgggggaggctcccggggctgggggaagaggagcctgcccccagcagaaacagcaggtctcagcggctacatgtgctttagagcttggctctctctgagcagatgggacaggaagacgggcactggggggctgggtggggcttagcgcaggtcctcctcatcgccctggatggtcttcttgatgcgcaagcnattggtggtgagccactggtccagccgggagatggagtcgtattccttcaccgactcggtgtagctgtccacattctgctcctcgtgggcctctagcaattttttcatcaacttgcattcccgggaatcagagaaagctgggaa

SEQ ID NO: 12841 - DNA, 617 bp, Homo sapiens
gagctgggaaagcacttgtctcctttattgaacatctgcagggggcacctctgcactgaccaggcagccaaaaaagcaagcaggcaggtgggggggggcaggggagcatggggcaggaagacccccaccctcatttccagtccttgaaaaattgcttgaagatgggactctcacggccctgaggcaaaatctccacctgagtgttcggggcgtactgcatgcgcgagatgaagccctcggccacctgcagggctgcctgccgctccttctcattcgcttttcgccccttccagatatagatcttgccacagagcccgttgtccagcacaaagcagtcatcaaatatcagcagttcaagggcaaaggggctggagtcagccaccttggtcagggtcatctggtccagtggcatcaaagaccttatacagagctgcggcctgggcatttgccttgtcagctgtgaggtcttcctcagggttgccctccttcagagcaggcttggggcccaggacctggatcatctcagcaggctcctccccatcagtgacaatctccacctgggccttgccctgtcgctcactgtcccggatggccagggccaggtccctcgccttgtg

SEQ ID NO: 12842 - DNA, 738 bp, Homo sapiens
  misc_feature 539, 604, 618, 651: n = A,T,C or G
gcgactttgaaagattgtaatatatgctctggaaaacattcagcagtacgaaagccctccctgggccctcccaccctctcatggtccacaactggtagaaaggtccagaaatccttgagctctggaaaggtccctggtcagtccttggggagctcagatagctatattggaagaacctgctcaagtacggttcttgatgtctggggaatcctttcggggaagatcacttcaaactcaataatgaggtccccacgtttctcgggtgttttggggagggggaggccttctccaggaacttttcgccgcatgccaggcctgataacatctttgaatacgacgggtatcgtcctgccgtccagagtggggacgttcactgtgcagccacacagagcctcccggaggctgatcctggcaggataaatgacatcagagccatctctcttaaagatattgtggggcttgtcctttaaaacaaagacgatatcagctggaatgttgttggaggtctggtctccttccttggggaaagtgattttggntcctttcttccacccctttctcacttcgatggtcaatattttgtcttcgtttcgaatgctctttncgtcggggtttagnccgcttgtggagattttcatcttcctggtacangccgctgtagatctctttcagggagaactcgaaggtcgtgggtgaccttggggattcttgcttcttttcggcccggcctcttgggca

SEQ ID NO: 12843 - DNA, 699 bp, Homo sapiens
  misc_feature 536, 596, 614, 633, 694: n = A,T,C or G
tttaaatttttgggaatttattgatttgcatttaaaagggaactgctgacaaagattcactggtaataatttgaacaagttggaaaatacagtcaacattactgaaacactactaaaataattccaggacagaacaaaacttcttagatgctgtctttgatgtgaaaattgactgcttcttacttttctaacacacggtggtataattaacaatattcaatcacttctattctttcctgcatatataaaaattaaaataccaattaaaaaactaatatatcttctctttatttcttacagatatgagttcaatgtttcactcaatagtgctgtggtttaagagaattttttcatttacaagttaaacaacaatccgcccaaagggaactgatagtctataggctcatagtgcaaataaacagtttaggaatgcagcaactgacatttctaaagtacaaaacagataaaattcttagaagatacatgcaaaaagctctactaagcagatggccacagaactagaacattgataattntactggcgatgtcaataggactccagatgtttccaaactcaacttgaactctcatcttangctttgtatttgcttttncagttcactaatgacacanacatgattcaaatcccctgagtattcattatagtcaagggcatatcctacaacaaactggnctgga

SEQ ID NO: 12844 - DNA, 90 bp, Homo sapiens
cccaccaccctggggcccaaaaaaacctaaccctttaagggggttgggccctgaagaaccctttttttgcccacccccccaaaggggggg

SEQ ID NO: 12845 - DNA, 467 bp, Homo sapiens; identical to SEQ ID NO: 1762

SEQ ID NO: 12846 - DNA, 476 bp, Homo sapiens
tgctggcccagggccacaccaagccacccgagcgcagtgccacaggcgccaagagcaagtacctcatcttcaccactggctgcctcacctactccccacaccagatcggcatcaagcagatcctgccacaccagatgaccacggcagggcccgtgctgggtgagggccggggctccgatgccttcttcgacgcgctggaccacgtcatagacatacacggacacatcatcggcatgggcctgtcgcccgacaacaggtacctgtacgtgaacagccgcgcctggcccaacggtgcggtggtggccgaccccatgcagccgccaccaatcgcggaggagattgacctgctggtgttcgacctcaaaaccatgcgggaggtgaggcgggctctgcgtgcgcaccgcgcctacacgcccaacgacgagtgcttcttcatcttcctggacgtcagcagggacttcgtggccagcggggcg

SEQ ID NO: 12847 - DNA, 482 bp, Homo sapiens; identical to SEQ ID NO: 1766

SEQ ID NO: 12848 - DNA, 778 bp, Homo sapiens
  misc_feature 4, 556, 562, 581, 651, 659, 671, 681, 688, 697, 709, 720,731, 764: n = A,T,C or G
gcgnccgctgcccgccttaatcgactgaagaagaaggagtacgtgatggggctggagagtcgagtccggggtctggcagccgagaaccaggagctgcgggccgagaatcgggagctgggcaaacgcgtacaggcactgcaggaggagagtcgctacctacgggcagtcttagccaacgagactggactggctcgcttgctgagccggctgagcggcgtgggactgcggctgaccacctcgctcttcagagactcgcccgccggtgaccacgactacgctctgccagtgggaaagcagaagcaggacctgctggaagaggacgactcggcgggaggagtctgtctccatgtggacaaggataaggtgtcggtggagttctgctcggcgtgcgcccggaagcgtcgtcttctcttaaaatgtagggtcaagtaatctgctctttatccgcgtttaccctttcaactcccttacaccatgtcaaattacttagtgggacatttcaccggacacatttcagaggagagaaaaaaagtaatattgaacttaaagtgtttantaaaancatgaatgtgacacagtanccactcctaatgataacatgtgactattaaaccctctgacagttctttttaagggattcctcctccagcnccgtgtanggttaagaaaangttccggctnaaactgnggaaaactntttggcaaaaanaggccaatttngccaattccgnttttttaaagggtttaaaaaaaaaatcccggcnaatttgggggggga

SEQ ID NO: 12849 - DNA, 525 bp, Homo sapiens
  misc_feature 407: n = A,T,C or G
tcggcacgagtttttgtatttttagtagagacacgggtttcatcatgttggccaggatggtctctatctcttgatctcatgatctgcccggctcggcctcctgaagtgctgggatttcaggtgtgagccaccgcgcccagcctaacctttttaaaaaaagtggttgttcatgcttaagaaatgagtttcagaactttgaaaaaaaaattccaggaatatagatcgcaaaattagaaaatactcttttgattcttttcattagaattatttgcttgatttcctctataaatttccgtaattaatttaagaagaccagcacagagctttttgagagcatattcatcttaaaatctcagttactgaaggaagatattcttgatgagacagaatgcttttctttatcttantcctgatctgacttctcaaagcggatcatctcggccttttatgtcaggattaggggcaaatgttgagaagaaaatcagacaagagattcaaagaacaaactgcattcatctgacgccc

SEQ ID NO: 12850 - DNA, 592 bp, Homo sapiens
tcggcacgagcttacaaataatactccaatgaatcagtccgtaccaagataccccaatgctgtaggattcccatcaaacagtggtcaaggactaatgcaccagcagcccatccaccccagtggctcacttaaccaaatgaacacacaaactatgcatccttcacagcctcagggaacttatgcctctccacctcccatgtcacccatgaaagcaatgagtaatccagcaggcactcctcctccacaagtcaggccgggaagtgctgggataccaatggaagttggcagttatccaaatatgccccatcctcagccatctcaccagccccctggtgccatgggaatcggacagaggaatatgggccccagaaacatgcagcagtctcgtccatttataggcatgtcctcggcaccaagggaattgactgggcacatgaggccaaatggttgtcctggtgttggccttggagacccacaagcaatccaggaacgactgatacctggccaacaacatcctggtcaacagccatcttttcagcagttgccaacctgtcctccactgcagcctcacccgggcttgcaccaccagtct

SEQ ID NO: 12851 - DNA, 177 bp, Homo sapiens
acacctatcccccattctcctcgctatccctcaaccccgacatcattaccgggctttcctcttatctgcctcggggaccaagcgccgtgtgttcatcgtggaaaccatggggggttactgcggctacctggccaccgtgactgggattgctgttggggccgacgccgcctacgtctt

SEQ ID NO: 12852 - DNA, 380 bp, Homo sapiens
  misc_feature 262: n = A,T,C or G
cacataaccaccataccaggaaatgcttttcaagggatgaataatgaatctgtaacactcaaactatatggaaatggatttgaagaagtacaaagtcatgcattcaatgggacgacactgacttcactggagctaaaggaaaacgtacatctggagaagatgcacaatggagccttccgtggggccacagggccgaaaaccttgtgagtagaatggtgctgcctcccctccctgcccagtgtaccccaacaggactgcttanggtgtccctccacatcatccccaagctgatatgtgagacatcagcctctacacctgaaaaggctgctgttggaaagacaaagtgtatcacagctgccataataaagtaccccaaaccg

SEQ ID NO: 12853 - DNA, 371 bp, Homo sapiens
cggcacgaggcgaggaggagcccatcccgctggaccagctgggtggctcctgcaggacccattacggctactcctctggggcttccagcctccatcgccactgggggctcctgctggcctccctcgctcccctggtcctctgtctgtctctcctgtgaaacctgggagaccagagtcccctttaaggttcccggagctccgggaagacccgcccatcccaggactccagatgccaggagccctgctgcccacatgcaaggaccagcatctcctgagaggacgcctgggcttacctggggggcaggatgcctggggacagttcagtacacacacacagtaggcccgcaataaaagcaacaccccttcacatc

SEQ ID NO: 12854 - DNA, 149 bp, Homo sapiens; identical to SEQ ID NO: 1785

SEQ ID NO: 12855 - DNA, 123 bp, Homo sapiens
tggtacgcctgcaggtaccggtccggaattcccgggtcgactactactactactaaattcgccgccgcgacgactttttttttttttttttcccccaaaaaccctttttttttgccccttttt

SEQ ID NO: 12856 - DNA, 394 bp, Homo sapiens
cggcacgaggctaagcaggaattatcagagtggaagggaccagcacgggaagaggaacccagcacaagaaggccccgtcccatgccccttcaggttcctttttcagggaactcggttccccttctgcccctctgccacagcctgttggggggccctttccagcgccgtgcccacactgtgtcccctccactgtggcccttttcttctcttcctcccttattcttgccttcacctactgtcctaagcccaggcccagttggcccctgggggaacctcaaagtgctttgtacaaggagcccagaggtctacgccatcatgcggggctgctggcagcgggagccccagcaacgccacagcatcaaggatgtgcacgcccggctgcaagccctggccc

SEQ ID NO: 12857 - DNA, 59 bp, Homo sapiens
ttcggcacgagggttaccaatctgaagtgggagcagccgcccttttttttttttttttt

SEQ ID NO: 12858 - DNA, 441 bp, Homo sapiens
  misc_feature 26, 123, 216, 223, 225, 234, 238, 240, 243, 248, 251, 260,278, 296, 384: n = A,T,C or G
gagaaaatagcacctcacttccaganagctttaagacaaaagctggagtcccaaataaaccaggcattcccaaattactagaagggagtaaaaattcaatacagtgggagaaagctgaagatnatggatgtagaattacatactatatccttgagataagggactgaaaacacaccgtcgatgaaaaccagccactgatgaacagcctcagacctnggcagtncngggggcgcntttnanccntaacnggntaagaaggnctgatttcatgccaactngagggggagaattccaantttccaaagacacttcctctcacaggactatgaaaaccatcttttaaagaagttccaaggacaaaaagtcacttccataattatagtnctggcaacttgatcctttagatctatttttgcttcatctgggctctgggcatttccc

SEQ ID NO: 12859 - DNA, 515 bp, Homo sapiens
tcggcacgaggggcgggagaacctggaccgggacattgccctgatgaagctgaagaagcctgttgccttcagtgactacattcaccctgtgtgtctgcccgacagggagacggcagccagcttgctccaggctggatacaaggggcgggtgacaggctggggcaacctgaaggagacgtggacagccaacgttggtaaggggcagcccagtgtcctgcaggtggtgaacctgcccattgtggagcggccggtctgcaaggactccacccggatccgcatcactgacaacatgttctgtgctggttacaagcctgatgaagggaaacgaggggatgcctgtgaaggtgacagtgggggaccctttgtcatgaagagcccctttaacaaccgctggtatcaaatgggcatcgtctcatggggtgaaggctgtgaccgggatgggaaatatggcttctacacacatgtgttccgcctgaagaagtggatacagaaggtcattgatcagtttggagagt

SEQ ID NO: 12860 - DNA, 151 bp, Homo sapiens
gacctccggcctagccatgtgattgcacttacactccataacgctgctgatactaggcctactaaccaacacactaaccatataccaatgatggcgccatgtaacacgagcaaatcacataccaaggccaccacacaccacctgtccaaaa

SEQ ID NO: 12861 - DNA, 518 bp, Homo sapiens
ttcggcacgaggacggaagggctccacctcagcagcctcaacagtatggtattcagtattcagcaagctatagtcagcagactggaccccaacaacctcagcagttccagggatatggccagcaaccaacttcccaggcaccagctcctgccttttctggtcagcctcaacaactgcctgctcagccgccacagcagtaccaggcgagcaattatcctgcacaaacttacactgcccaaacttctcagcctactaattatactgtggctcctgcctctcaacctggaatggctccaagccaacctggggcctatcaaccaagaccaggttttacttcacttcctggaagtaccatgacccctcctccaagtgggcctaatccttatgcgcgtaaccgtcctccctttggtcagggctatacccaacctggacctggttatcgataaggaggctcctctacaccaattaatgtagctgctagctattggcctcccaaaagactccagtactattttaat

SEQ ID NO: 12862 - DNA, 659 bp, Homo sapiens
  misc_feature 529, 545, 609, 639: n = A,T,C or G
ttccatttcttaaataaacatgaatatatatatattttttcttttataaaactttcatggaataagggtagggtgggggcttcggtggcctggcttcctggcatcactcgtcatcaaagttctgactcaggaggaagttggcagccaagttctcatttttttcacacgcgaaataggcctggatgaccaggctctctgggaagcccagggccttcaacctctctatagcttctttctcctgcggcgtcacctggatgtagttcatctgcggggcctcctctcctatggcgcccacctccccctccacatatgagatgtccgccagctccccagggggctcgttcagcatctggatgaactgctcctggtgccggctgatttgctgcaggagagggtggggaagggaaggtaattcacagccctgggtccctcctctccccaggtcatcacagcccttgctttttcattcagtcaggcaaatatccagaggagcctgttcttgggcaaacacaacataagcagtcgacanaagcctaacctggaanaactgatgaatgtgcctttaagtgagccagaaataagccggggacggtgggtcaaactgtaatnccagactttgggagcaaagcagtgatactnaagtagattcagtcacctgt

SEQ ID NO: 12863 - DNA, 456 bp, Homo sapiens
  misc_feature 49, 163, 412: n = A,T,C or G
tgctgcttaatacattttattcaggtctgtcattacacttgcgtgaatntcatcgggtgaggttttatttgcaggaggagaaggtcttccagaagaagttcctgcagggcattctgtcccggcgcgcggattgctgggggggtgcgccttcctgccgccttgncacctcccgagcttcctctcctatgaggggcccggcactggcctggggaggtccactcaaaccaccaagcgaggaaagtcaggaggctgcttttccttattcctgccgcttcctgcatatgctcgctgtctcggccggtggggcaccctccaggggcagggcagcggtggccgtggcccggaagagcagcagcagcaggaggccgggggacaatggcatcttgtgggctgactggaacttctctcccancctgctgctgctcttccttcctggcagccctgaaatcaatgttt

SEQ ID NO: 12864 - DNA, 542 bp, Homo sapiens
  misc_feature 424: n = A,T,C or G
tcggcacgagggctcacaccaggcagccttctagtggtctccctggccaccttgggcagagctgggtcatgcagcaccccatccttacccggtgccctctccttgccagcttctccccaggccagagcggccatcgcgtaaaaagaaccagggtgtccccgggacaggccgtcccccaccccatcctgtagaagtccattccccttttccctcctgtgctctgtcccccaaggagtcatggaactcagggtactgggcctcaacgggaacctgagacagctccagcttcgcagcccttcccggagctacagggggatcctctagcatggggggtgtgacttggttcctttgaccaggtcctgtgaggaagcctggagcaagggtctcccccagcaggatgggtggggcctgctctggagctgancccgtggccgctcacaggtgtccttagtggtgttgcagctgtctactggctgcatgtgctgtgaatatcccaaggaactggctgtggaatgcgtgtttgggtcagtctgtgccctctc

SEQ ID NO: 12865 - DNA, 513 bp, Homo sapiens
ttcggcacgaggacattcaccactgtactgagtgaccaacaggtggtggagctgatccctgggggtgcaggcatcgtcgtgggatatggggaccgttctcgtttcatccaactggtccagaaggcacggctagaggagagcaaggagcaggtggcagctatgcaggcaggtctgctgaaggtggtaccacaggctgtgctggacttgctgacctggcaagagttggagaagaaagtgtgtggggatccagaggtcactgtggatgctctgcgcaagctcacccggtttgaggacttcgagccatctgactcgcgggtgcagtatttctgggaggcactgaacaacttcaccaacgaggaccggagccgcttcctgcgctttgtcacgggccgcagtcgcctgccagcacggatctacatctacccagacaagctgggctacgagaccacagacgcgctgcccgagtcttccacttgctccagcaccctcttcctgccacactatgccagtgcc

SEQ ID NO: 12866 - DNA, 637 bp, Homo sapiens
  misc_feature 470: n = A,T,C or G
tcggcacgaggatagcatccaagagttccggctgtcagggtggctggcccagcaggaggatgcacaccgtatcgtactctaccagacggacgcctcgctgacgccctggaccgtgcgctgcctgcgacaggccgactgcatcctcattgtgggcctgggggaccaggagcctaccctcggccagctggagcagatgctggagaacacggctgtgcgcgcccttaagcagctagtcctgctccaccgagaggagggcgcgggccccacgcgcaccgtggagtggctaaatatgcgcagctggtgctcggggcacctgcacctgcgctgtccgcgccgcctcttttcgcgccgcagccctgccaagctgcatgagctctacgagaaggttttctccaggcgcgcggaccggcacagcgacttctcccgcttggcgagggtgctcacggggaacaccattgcccttgtgctangcgggggcggggccaggggctgctcgcacatcggagttctaaaggcattaaaggaggcgggggtccccgtggacctggtgggcggcacgtccattggctctttcatcggagcgttgtacgcggaggagcgcagcgccagccgcacgaagcagcgggcccgggagtgg

SEQ ID NO: 12867 - DNA, 553 bp, Homo sapiens
cggcacgaggggagcttgctgagtgagagatggagcctcatggtgtacaactgagggtagttaactcatcacttctcccaagcactcgatcccagcttcacccactggtgttgctttgcttgaactgttcaagccttttatagccttaccataagtatttagatatggtgtccttttctgtttttggggggggagttttgttgtgtttttttaaagtaagtgcttaagtattaactttgggttgtcccctctgtatgtttcgaaggggttttggttctttttgcttctgttttcttaaacatgttttccactcccacttgggcattttggaagctggtcagctagcaggttttctgggatgtcgggagacctagatgaccttatcgggtgcaatactagctaaggtaaagctagaaacctacactgtcactttactgagatttctgagtatacttttcatattgccttaatgtagcagtaatgtgtttatgcatttgtttctttgcacagacattttgtcaaatattaaaactctacttttttatggcacata

SEQ ID NO: 12868 - DNA, 328 bp, Homo sapiens
aaaaatcccccccccttgccaaaaggggggccaaaaaaaccccttaaatttttttttcccaaagaaaggaaggaaggaaaaacacgggggggaaacccaaaatcccccccccctttggccttgaaagaaagggggcaaccaattggggccttgaaccccctttttaacgggaaaccaaaaataaaaaccccagcaccataaatccggggaaaccctttctttgggaaaaactttgaattaattttttggagggtataaaaattttcccttgaaaacaaaaaaatttttaaattgggcttttctttccacccgttggggaaaaaatggg

SEQ ID NO: 12869 - DNA, 588 bp, Homo sapiens
tcggcacgaggctgattctcccaggattcatagacttcatagctgatgaggtggacctgacctcagccctgacccggaagatcacgctgaagacgccactgatctcctcccccatggacactgtgacagaggctgacatggccattgccatggctctgatgggaggtattggtttcattcaccacaactgcaccccaaagttccaggccaacgaggtgcggaaggtcaagaagtttgaacagggcttcatcacggaccctgtggtgctgagcccctcgcacactgtgggcgatgtgctggaggccaagatgcggcatggcttctctggcatccccatcactgagacgggcaccatgggcagcaagctggtgggcatcgtcacctcccgagacatcgactttcttgctgagaaggaccacaccaccctcctcagtgaggtgatgacgccaaggattgaactggtggtggctccagcaggtgtgacgttgaaagaagcaaatgagatcctgcagcgtagcaagaaagggaagctgcctatcgtcaatgattgcgatgagctggtggccatcatcgcccgcaccgacctta

SEQ ID NO: 12870 - DNA, 525 bp, Homo sapiens
ccctgaagtcctcttttctccacagaatatttacaaacagggaaggggtggaggccacttccgccaccaaaggggctaggggggggggcagtgctaagacacgcctctgcgcagggagagttcctgaggagggcccagtgtgaccacagtgccctcaggggccaggtggttccagacggctcaggccaggtcggcggtgggtgagcccagctgcttggaggccaggaggaggcgtgtggctgcactctcagactccgcctgcagccgccggttgttgtgtctcaggctccgcacctcctcctccagggccgccctgtccgccttctccttctgcaggtcctcctgcagcttcctgagcatggactccaagtgagagaccttctctgagaggttcccaggctctggctcagcatcagattttggagttcccttagggtctccactctctgggatgggctgtcctctcgggacagcgactccagaatggtgttgcagtagaggcatctcgagatggctgcactcgtc

SEQ ID NO: 12871 - DNA, 457 bp, Homo sapiens
  misc_feature 208: n = A,T,C or G
tcggcacgaggtcttaaataattttattggtattgctttcactaatagtctttttcataagtcattattattcataagtcattgtctgtttggcttttgttttaataagggaaatttttatcctattttgctattctcctgaggagcatgctctttaacttcacttttgttttttagtcaagttgatattaatccctatttctttatnaggttgcttgctgaaacagatactacagtgactagtaatatcctaaaatttcctctaaaagccttgcacttattacatttgtacaactgggcaccaatccgctgaagagctcatgaattgaaaatggggctttccagggaatgaagaaactctcctacatccgcattgctgataccaatatcaccagcattcctcatggtgatagaagattctccaaaacattttgaaaaatttaaattcgaaggcttt

SEQ ID NO: 12872 - DNA, 319 bp, Homo sapiens
cggcacgaggcctccttggtttggatctcgaattcggatcgtcttacgctccctcttgggagcaatctggggtggctggttcatcaaaactggggcgggggccacgccagtgggaaactgctgcaccccttgggctggatagtaggcgccagcgtaggtcccaaattctgtagggcttgcacctggatagaagcctggggctcctggctgcacagggtactgctgtgtcgggacaacgtatgtggaacgccccccctcgattaagaacaagtccacggtgcggcctacaggttctgggcatccgagggcctggggttgg

SEQ ID NO: 12873 - DNA, 426 bp, Homo sapiens
  misc_feature 375: n = A,T,C or G
cggcacgaggttttggaaaaacctcaaatctttaatttctctcttcgcctggtgcagcccagacgtgagacacctgagcttcaaaaacaaacatggtaaaaacagccccagggcccgagagccgttgagttaagtgcgagtgggggagtcccctctccaacacccctcaaagtgcatcgggactggccccccaaagctgggcccataacacccttgataaatctacgggccgacaggcgggagggtggctgcccccagggcccttggggctaaggggacagcggtgtggtttggctttagtgcaaaaagctggtttctttaaaggcactttgagtggtgggacccctccccgacctggcgggggggagggttcanggtcagccccgcccccccaccccaagtaaaagcagaccctgcagctggtga

SEQ ID NO: 12874 - DNA, 542 bp, Homo sapiens
  misc_feature 433: n = A,T,C or G
tcggcacgaggattatttcagaggtcactgaagactgtgattacatgcacctgccttagaaggtaggattttcttcccaggacctcctatcaccctaccctgcttcttgaggtccctggagccccaggtgggctgaggggcagggagccggctgtgcccagtatgcctcctggaccctccagttctgccacaggtctgccgatgccctgtccactgcctacacatgacagacaagtaaccccctcatgggggatggggacctacctggctcctcagccagcacccagcttaacccctgccatcccatgctgggccctccaggccaagagtctcagctggccgagagtccaggccttgcctcccccgaccgccatggagggggcagcccggcacagctgctgggagcccttgtgtgtctggtcacactttttangcgtcacgccaaaggccagcctcctggccccaatacccattttggaagcccctgtggccgtgtggatgtcggtaacagttgtataaaataaattctatttatcgctatt

SEQ ID NO: 12875 - DNA, 821 bp, Homo sapiens
gactggctagaaatttttattatttgcgaggcagtaagtgctcttgagagcaggcacagtgctgggaacactaggccccttcgggacaaaccagggccttaaggaaaggggcttcggctttggcttgagggaaggcacataactgggacaggccctggcggggagtattcagaagccaagtgggttgctggtgaccacaccaccccgctccaccaaggccttggagatgcttttgaagttgcggtagagctcttgctgccaggggtcagactgcagggcggccatgccctctcggatccgagctgcagcctcgatacaccaggtgtcacagagcattttctcatgctgggccgtggggtgggcctcactcagggatcttgaggccctcgagagaaacaccaccatggcatagaggtcgatggccccgtctgccagccgctgcagcaggaaactgtccatgacaatccccttcttgtgtttaatcagcttggcctccaccacagtggcaaactgcttccagagcccgtatgccagctgcgcatttcgactcaactccgggtggacaagtcccgctgagatcaggcccgcgccccagcctgccccgccgctaagtctttttgcccgcctctcctagcaggagggccagcatttcccaaagggatttctttagaggcactgcaaagcccagaagaagctccttcccttggttccatacagcccctgaggagcaacaaacaggccaaagaattttattttgttcccctaaaaagttcgggaagaatgcgagaaatctgggagaaacacgccccttggtgccaaat

SEQ ID NO: 12876 - DNA, 269 bp, Homo sapiens
gctttttttaaacttaatattctttcccgtttccccccttatataaaacggggggtttttgggggcccctttgtttggaacgaaacggctgcatggggtaaaaaaaactgtttttttgggggttttggggggggggtgttatggattttttttcctttgcgtgtttgaaacaccgtctccccaaaatctcaacccccacttgctttttaatttgtcctcaatccggggtgccaaatttacccggccctaaacccgccttctttttaaaa

SEQ ID NO: 12877 - DNA, 677 bp, Homo sapiens
  misc_feature 539, 573, 606, 619: n = A,T,C or G
tttccaatccaagccaacatttattgttgcacaagcctgttgcagtcctgaggggatcttctggcagaggtgtgggtaggaagctgagtggccactggggtgaagggcagacagaggaggctgtgaccagcaggctcctatccagatgatacatgagatggaggcctcctcagccacactccagggagggtggggtggcaaggggaattcagggataatggcattaataatacaagtggtaaacaaataaccaagaggatctggctggttacgatacacaaaagttagcagtaagagtccgtgctttcacattcctatcagacagatctgagttcaaatcctgtatgtgtagcagggtgaggtatctgctttctgtcagagcccatgggtgcacatctctgagcctagttacaacagttggcacataggtgggtggacaaggagggcagctcttgattcctgttgcttccacagcacagagagataagtatggctggtgtgacagatcccacttgacagatgaagccactgagacttgnagagcaggtaggcttagtccgagacctagcattncgtggtggctgccttctcatttcccagaggctncagagtccctcangtccttggttgcaccgtcctcccaccagactgacccagggccagtccacttcggtggg

SEQ ID NO: 12878 - DNA, 276 bp, Homo sapiens
gagaagacgacagaagggcaaaagaacacaaagagagcaagagatggaacttgcagcatcaagccctttcataatggcactattccactcataagggtggagccctcgtgaactaaacacctcccattaggccccaccgcccaacaaagttccactggaggttacatttcaaacacatgctttttggaggacacagtcaaaccatagcaccaactatctgccttttccactggggggataaaaaaaaaaaaaaaaaaaaaaaaaaagtcgtatcga

SEQ ID NO: 12879 - DNA, 284 bp, Homo sapiens
tcatgtttaaaacagttttaatcacttgagttttcatacaagcactgctttgttttcccacagcctcttgattattataggtattttccgaataatagaagaaaaaaaaaatctgtaaggcaaatttactagtctacctccatgacaacagaagatcttctcatccacaatggctgctataggcagacagttaaaacaatcagtgaaggtcttccacaatttaatattaaatcttcgtttgcattcatcatagaatccataaatgcgattgatgctagcacact

SEQ ID NO: 12880 - DNA, 542 bp, Homo sapiens
gggaatgtgggtggagggggatcatagttctccctgagtgaggcttgcctgctcctctggcccctggtcctgtcctgttctccagcatggtgtgtctgaagctccctggaggttcctacatggcagtgctgacagtgacactggtggtgctgagctccccactggctttggctggggacacccgaccatgtttcttgcagcaggataagtatgagtgtcatttcttcaacgggacggagcgggtgcggttcctgcacagaggcatctataaccaagaggagaacgtgcgcttcgacagcgacgtgggggagtaccgggcggtgacggagctggggcggcctgacgctgagtactggaacagccagaaggacatcctggagcaggcgcgggccgcggtggacacctactgcagacacaactacggggctgtggagagcttcacagtgcagcggcgagttgagcctaaggtgactgtgtatcctgcaaggacccagaccctgcagcaccacaacctcctggtctgctctgtgaatggtttctat

SEQ ID NO: 12881 - DNA, 696 bp, Homo sapiens
  misc_feature 494: n = A,T,C or G
ttcggcacgaggcgagcacggcggcggcgtcgtctcccggcagtgcagctgccgctaccgccgccctctgcccgccggcccgtctgtctacccccagcatgagcggcctgcgcgtctacagcacgtcggtcaccggctcccgcgaaatcaagtcccagcagagcgaggtgacccgaatcctggatgggaagcgcatccaataccagctagtggacatctcccaggacaacgccctgagggatgagatgcgagccttggcaggcaaccccaaggccaccccaccccagattgtcaacggggaccagtactgtggggactatgagctcttcgtggaggctgtggaacaaaacacgctgcaggagttcctgaagctggcttgagtcaagcctgtccagagttcccctgctggactccatcaccacactccccccagccttcacctggccatgaaggaccttttgaccaactccctgtcattcctaacctaaccttanagtccctcccccaatgcaggccacttctcctccctcctctctaaatgtagtcccctctcctccatctaaaggcaacattccttacccattagtctcagaaattgtcttaagcaacagccccaaatgctggctgcccccagccaagcattggggccgccatcctgcctggcactggctgatgggcacctctgttggttccatc

SEQ ID NO: 12882 - DNA, 631 bp, Homo sapiens
acctgatgttttagttagcctatgtaaccccatcacaggttgatgtacagtttccattaggttctggaggaaatactgaaagcagtgtgtgtacctgcccactgccttcacacaccccggcctgggtttttaattacttcaagcaggccagcctcaggtgcccacagccctgagaaccagtctgtgcccagtttctttctcttctctcagattatgaactccccaaaggcaccatccaggtttttaccccgcttgtcaaattcccctctggcccagggctggctgctcagcaggagtgtttaataagcacttaattgcccggtgagtacagaccattccagctcaccttaactgtttcctggctgactcgcctctcggcctgattgccctgctcatctggctgagtgagctggaatgagtgtagtggtagtgccacctataggttcctcttaccttggtcttatttcacaggagcacttcccgaacgagtttacctcgggagatggaaagaaaggtatgtcccatgaaccatggtggctgcagttgaggagtgggccttcctctccccttctctgtctgcttcctccagtcaggatctgccacacagatcacatctgcatgcctggcacct

SEQ ID NO: 12883 - DNA, 464 bp, Homo sapiens
  misc_feature 177: n = A,T,C or G
agagccagctactggagtcattccgtttccactcattcacccaacctcagggttctccccatctgagccagcctgctggtgtgacttactcatcctccattcctctgcacttgcagactttctgagccagggttttcttttagtggaaacaaatggttgatggatccagatccttanaaaaggagaggatgggggtagagtctcccaagccaaaattttgacatttgagtgctttcgtaagccctgtacatgtactattaattcagtcattcagccaagcctcctcctctagcagcaatttccagctgtttaacactatcctgggcaaatgttttaccctgtcctccagcctccctgcttcccttctggccctggaagactgagtctggacggcagaatggagggactgggaggctgtggctgcctccctccctcagcccggctgggactgtctcccggacccc

SEQ ID NO: 12884 - DNA, 462 bp, Homo sapiens
tcggcacgaggtttttttttttttttttcaaaaggggtcggaaatgcaggggggcaataatacttaattgaaaactaaaactcctgggttaaaggaatcctcccacctaaccctcttgattacctcctttaaaaggcttttcctattacccccagttatttttaaattttttgaaaaaatggggtctcctttttttcccaaggttggtttaaaactctgggcctaaaccaatcttcttgccaaaaactccaaaagggccggaattataggcttaacccattgcccctggaaaacccgggttttttttaaaacctaaattttacccaaagggttaaaaaccaagggaaaaggggatttttggaacgaaatttttgtgggtttgggttttccaaaaccctttttttttcaaaccttttaaactaaacacttttttgccccaatttgttgtttgcatttgaaaac

SEQ ID NO: 12885 - DNA, 401 bp, Homo sapiens
  misc_feature 259: n = A,T,C or G
gccccaaactgggaaagaagatgctaattaaagtgaagacgctgaccggaaaggagattgagattgacattgaacctacagacaaggtggagcgaatcaaggagcgtgtggaggagaaagagggaatccccccacaacagcagaggctcatctacagtggcaagcagatgaatgatgagaagacagcagctgattacaagattttaggtggttcagtccttcacctggtgttggctctgaaaggaggaggtggtcttangcagtgatggaccctccattttacctctttaccctgtcgctcataatgaggcatcatatatcctctcactctctgggacaccatagccactgccccctcccctggatgcccagtaatgtatgtctactggtgggagactgtg

SEQ ID NO: 12886 - DNA, 567 bp, Homo sapiens
  misc_feature 311, 397: n = A,T,C or G
ttcggcatgaggacatgaaacacaggcacagggttcacagtaagcacatggacaagtgggcacagggtcataggccagatgcacatccagccatggctgggccagacactgggacacagtggtggtgtcacacacagaccacaggggggacacatggatttgacagccacaatgcacagaccaggctacagagctcgagggacgtgggaaggggccttttggcactactgcactggaatcatgtgagacaaaggtagcaggacactctggcggtgcctggggcggtccccttgcggcctctctaggcttantccgtcttccacactttgttgagcagcttcaccacttcatcatagatgacaaacactatggccacatccaggcagacccggcccangcgggggacagtgcccttgtagaatgccttgagcccctccttcttcaggatctgcaagccgcagtcccacgtgttccggtatttgtgcgcctccaggccctgcatccgggtcttaatcacatccagaggagtgtttccaaagacactggctgcgcctgcaatagctccga

SEQ ID NO: 12887 - DNA, 56 bp, Homo sapiens
gtgcgctagacagccgcttatgcaccaactagaagaagaaaattccggggatgttg

SEQ ID NO: 12888 - DNA, 222 bp, Homo sapiens
tggtacgcctgcaggtaccggtccggaattcccgggtcgacatcatcatcatgatcgctcgacatcgatacgactttttttttttttttttttttttgggtaaaaaaggggggaattttttaaccccccgggggggggtaaaagggtttttggggggaagggcccccttgccgggaaattttgcaaaaattttttggcccttttgggggtttttccaaaccc

SEQ ID NO: 12889 - DNA, 567 bp, Homo sapiens
tcggcacgagggaccttgcttcccaaataagacatgtcagaagatgctgataatcctcacttctgcattacaaatcgctcataggtgcatctgcaggatcttacttggatccagagtgctagctgcaaaagcttctgggaattgtacacttaactctgaagttttatctttaatataggaagtgccgcgtatgatgctgtccttgacagaaatgtggccattaagaagctcagcagaccctttcagaaccaaacacatgccaagagagcgtaccgggagctggtcctcatgaagtgtgtgaaccataaaaacattattagtttattaaatgtcttcacaccccaaaaaacgctggaggagttccaagatgtttacttagtaatggaactgatggatgccaacttatgtcaagtgattcagatggaattagaccatgagcgaatgtcttacctgctgtaccaaatgttgtgtggcattaagcacctccattctgctggaattattcacagggatttaaaaccaagtaacattgtagtcaagtctgattgcacattgaaaatcctggac

SEQ ID NO: 12890 - DNA, 435 bp, Homo sapiens
  misc_feature 20, 46, 132, 399, 408, 413: n = A,T,C or G
gatcagtgggcatggcttgnatgggaggtatgctcctctgcactgnccctctggcaccaggcaacatggcattgtcagctctccatcctcctccttctcagctgctctgttctcgacagcttcggggaactnattccgcagccttccaatgaagtcaatctactggattcaaaaacaattcaaggggagctgggctggatctcttatccatcacatgggtgggaagagatcagtggtgtggatgaacattacacacccatcaggacttaccaggtgtgcaatgtcatggaccacagtcataacaattggctgagaacaaactgggtccccaggaactcagctcagaagatttatgtggagctcaagttcactctacgagactgcaatagcattccattngttttaggnacttncaaggggacattaacctgtact

SEQ ID NO: 12891 - DNA, 463 bp, Homo sapiens
  misc_feature 14, 30, 32, 55, 60, 79, 91: n = A,T,C or G
gcgaccgcgcggtngaccgacgccggcatngnaccgagtgggggccccgcgcggngcctnccctctccgcgccgccaanccggggactgcncgcgggtcgggtttcccgccagctcaggtggatctcgagccagaggggaaagtatttgtggtaataacccttaccgggagtttcactgaagctactctccagagagaccggatcttcaaacattttaccaggaagcgccaaagggctatgcgaaggcgagtccaccagatcaatggacacaagttcatggccacgtatctgaggcagcccacctactgctctcactgcagggaagtttatctggggagtgtttgggaaacagggttatcagtgccaagttgtgcacctgtgtccgtccataaacgctgccatcatctaatttgttacagcctgtacttgccaaaacaatattaacaaagtggattcaaagat

SEQ ID NO: 12892 - DNA, 612 bp, Homo sapiens
  misc_feature 142, 321, 480, 546: n = A,T,C or G
ttatgttaactgcttaatttatttagtctgatcaatggcccagttcaggcccaccactcctacacttgctggggacagccaggaaacaaccagccacacaatgctgaactgtgctgctgctgggagtccagggctcagcctnaaagcaagcttgcaaacttcacacataagtacagtctatatagcaagtaaactctgaccagagatgacatctggtcccacaactcatcaggtctatgtacaatatttcacataccacccaatagataagataatattaacagcaaccactctcctttatcaattccccctgctccaatnacaaccaccacacattgcattaataccccaaacccattcccaatttattaaatatggtgcaagctcatagacacttagaagaggcaaatctagttgtgatgaagagttcctagagctctgggagccaagatggagggttttccagtacctgcacatgtnggctcaggaggatgctggccaggagctaatgagttgggagagccaacatggggggtagaagtcagntgggccagctcagggggctatctctctcaggatctcagctttgggacttggcaacacctctttcca

SEQ ID NO: 12893 - DNA, 590 bp, Homo sapiens
tcggcacgaggagggtaggggcactgctgcaacttctgctttcatcccatgcctcatcaatgaggaaagggaacaaagtgtataaaactgccacaattgtattttaattttgaggtatgatattttcagatatttcataatttctaacctctgttctctcagtaaacagaatgtctgatcgatcatgcagatacaatgttggtatttgagaggttagtttttttcctacacttttttttgccaactgacttaacaacattgctgtcaggtggaaatttcaagcacttttgcacatttagttcagtgtttgttgagaatccatggcttaacccacttgttttgctatttttttctttgcttttaattttccccatctgattttatctctgcgtttcagtgacctaccttaaaacaacacacgagaagagttaaactgggttcattttaatgatcaatttacctgcatataaaatttatttttaatcaagctgatcttaatgtatataatcattctatttgctttattatcggtgcaggtaggtcattaacaccacttcttttcatctgtaccacaccctggtgaaaccttt

SEQ ID NO: 12894 - DNA, 391 bp, Homo sapiens
  misc_feature 32, 382: n = A,T,C or G
ggaactcagcactcatcctcacccagcaggcnataagggtttcggccagccaggctggaccctggagccgaggttggggtctcctcatccccttctccctcctcatccgcatcccggtcctcctctccctcctcctcacaggagctgctcagctcttcctcttcctcctcctcctcgtcacctgctggccccaccctgccctgcaaaaccaccagctccgtggtctctggatgggactcccaggtgcctttctgttcactgtagcctgggggatgaaaacacaggctgaggcggccgtccactgccagccgcaagagactgttggctgctctgtacacatcattccgagccgccttggctgtcttgtaaacacgtttctctngccaggctt

SEQ ID NO: 12895 - DNA, 442 bp, Homo sapiens; identical to SEQ ID NO: 1855

SEQ ID NO: 12896 - DNA, 600 bp, Homo sapiens
  misc_feature 415, 556, 592, 597: n = A,T,C or G
catgttcacttctttatttttgatacaaatgtacatgacacgtcttgacagcccacccaccaccacacaggtagggcctggccccagggaagaagcgggatggggagagagctggtgggtcccaccgtctgcctctccagccttcccaggctgcagccaggttcccaggcctccagagggtgggaccacagcaggtgcaggtagtgatggtgggtgctggccttgcagaggttacggggaggggactcaagctccacagccaccaagctgagtcggggaccccggggaagccagccccaaggctcaggtgctcagtcctccacccctaagccagcacacattccccctccaacgcaggaagcaggaaggagatgggaggggaagtggttttttgatttaagttccataagagaanggggcgagagtggggaagggattaagggaaggcagcttggcaaggaccaaaacttggctaacccggacagttccctggcttccaagttgggggaaagggaagctgattccccatgcttggttccactgctctggtcccctnacccttcaaacttcagattggaacaaggcctccggnaaggnatt

SEQ ID NO: 12897 - DNA, 561 bp, Homo sapiens
  misc_feature 440, 514: n = A,T,C or G
ttcggcacgaggccactgtgaccatgacaggaaatgggactcggccccccccaactcccaatgcagaggcacctccccctggtcctgggcaggcctcatccgtggctccgtcttctaccaatgtcgagtcctcagctgagggggctcccccgccaggtccagctcccccgccagccaccagccacccgagggtcatccggatttcccaccagagtgtggaacccgtggtcatgatgcacatgaacattcaagattctggcacacagcctggtggtgttccgagtgctcccactggccccctgggaccccctggtcatggccaaaccctgggtaagagtgagggcatcagggcaggctgagctctgggtagagaaagggaagggctgagtgggtgggttgaaggggtccaggttcaaggttacatcaaacccgccccccangctccaccctcatccagctgccctccctgccccctgagttcatgcacgccgtcgcccaccaaatcactcatcangccatggtggcagctgttgcctccgcggccgcaagcttattcccttt

SEQ ID NO: 12898 - DNA, 577 bp, Homo sapiens
tcggcacgaggggctccctctttcctcccaatcctaagctcctgacaagtggccaggtggctctgggccctcctgccccgtgcctaggtcaggggtcctggaataccccgtagctctggcaccaccacactggcctctgatggcaagacttggcccctccacctgtccctaacggacggcaggtcaggaaagccaggactcaggggagaagcaaacccccaggattgaaggctagggttctagggcctttgggtggggagggcccgggccggacagcctcagctccgtcccctgccccacaagattcacctgggcctccagtcccacgctggccccaactgctgcagctctcggcttccgcccaacagcctctggaggtgaggcgggagcatgccctcagcgaggctgggcggcgggtcctgctgtgccatctccctgtgcgcctgagcagatcaatccaccagtgcaaaacagggctaacggcacctgcaggacagcagcacgctccatccctcatgctcagctgcctctgcggccacggacttctgcccttcatctgctctctcttactctcctg

SEQ ID NO: 12899 - DNA, 615 bp, Homo sapiens
acacctcagtcgtccacccagtgctctggcttctgctgggatcctggtccctcaccactgccctgcgccagaggagcgcactggcgctgcagcacaggcccgtggtgctgttcggagacctcgctgggactgcgccgaagctcccaggaccccagcagcaagaggccgtgacgctgcccccgaatcttcacctgcagatcctgagcatccctggctggcgctacagctccaaccacatggagcactctcagaatctccggaaaggccatcgaggggaagcccaggctgacctccgccgtgtcctgctgcggctctaccacctgtatgaagtgggcgaggacccagtcctgtctcagccagtaacagtgaatctggaggctgtgctgcaggcgctggggtccgtggtggcagtggaggagcgctcgctcacagggacctgggatttgagcatgctgcaccgctggagctggaggacggggcctggccgccacagaggtgacaccacctctccctcgaggccaccaggaggccccatcatcaccgtccacccaaaggaaatccggacgttctttattcactttcaacagcagtgagccctgggcagatgccccgtcc

SEQ ID NO: 12900 - DNA, 427 bp, Homo sapiens
  misc_feature 359: n = A,T,C or G
gcaattacagagtggtattcagttaacagaacaacaattatttcgtataagctgcatcagagacaactgaagatgaaaaaactaccatccccatatataactaatttgtgctgtgcccaacaagaacctgctttaaatttccatgccaatttacaacccccatactgtaccaggcaaggttagtggctattgaaaataccaccaggacagggctatctaaagacacattcggtagtgtgttaactatacaaaaaaagacactgtacagtttaaaaacaaatcttacacagccttacatttcaatttttttctttaaaaggagtgagttgtgtacaggggggttaaatgctttatagacnagaaaaaaaaaaactgcgctagaaccaacttattcatcatcatcatcttcttcttcatcttcatcttc

SEQ ID NO: 12901 - DNA, 681 bp, Homo sapiens
  misc_feature 133: n = A,T,C or G
gacttggcacgagtaaaatgtgcttgtctttgtgggctgtttcatcttctgttggtttccaaaccacatcctttacatgtatcggtctttcaactataatgagattgatccatctctaggccacatgattgtncaccttattgcccgggttctcagttttggcaattcttgtgtcaacccatttgctctttacctactcagtgaaagcttcaggaggcatttcaacagccaactctgctgtgggaggaagtcctatcaagagagaggaaccagctacctactcagctcttcagcggtgcgtatgacatctctgaaaagcaatgctaagaacatggtgaccaattctgttttactaaatgggcacagcatgaagcaggaaatggcactgtgattttggccattcaactcactacctggagagaacttagtaactgttaaaattcctattcggcagatcagaacttgctgttgcttagctaatttattaggcaattgcatgattgactcagaaaatgcaagacattttttctctacactagactttattttttctcttttcatttcctaataattagaatatgagaaaagactgtaaatcactacatataatacatatatgtatatatatgtatttgcacacacacatgtacacacatgtacattatatatatttcacattta

SEQ ID NO: 12902 - DNA, 598 bp, Homo sapiens
  misc_feature 55, 467: n = A,T,C or G
ttcggcacgaggccgcccacgtgcccccatcattgctgtgacccggaatccccanacagctcgtcaggcccacctgtaccgtggcatcttccctgtgctgtgcaaggacccagtccaggaggcctgggctgaggacgtggacctccgggtgaactttgccatgaatgttggcaaggcccgaggcttcttcaagaagggagatgtggtcattgtgctgaccggatggcgccctggctccggcttcaccaacaccatgcgtgttgttcctgtgccgtgatggaccccagagcccctcctccagcccctgtcccacccccttcccccagcccatccattaggccagcaacgcttgtagaactcactctgggctgtaacgtggcactggtaggttgggacaccagggaagaagatcaacgcctcactgaaacatggctgtgtttgcagcctgctctagtgggacagcccanagcctggctgcccatcatgtggccccacccaatcaagggaagaaggaggaatgctggactggaggcccctggagccagatggcaagaaggtgacagcttcctttcctgtgtgtactctgtccagttccttt

SEQ ID NO: 12903 - DNA, 175 bp, Homo sapiens
actctgggttccacagcacagcagacatggaacgctgaagtctctgaaagtgaagttgtaaaaagaaaaggaatgaaataaccgacccatcatcttctcacccaccctcattgcattccgctgtagtgaaaggacgagccatttctgggcacgtggcagcagtcgctgatctccc

SEQ ID NO: 12904 - DNA, 622 bp, Homo sapiens
  misc_feature 238, 474: n = A,T,C or G
ttcggcatgaggatccggtactgtgcccaggatgctttcttccaggtgaaggaggtggacgtgggtttggctgccgatgtaggaacactgcagcgcctgcccaaggtcatcgggaaccagagcctggtcaacgagctggccttcaccgcccgcaagatgatggctgacgaggccctgggcagtgggctggtcagccgggtgttcccagacaaagaggtcatgctggatgctgccttancgctggcggccgagatttccagcaagagccccgtggcggtgcagagcaccaaggtcaacctgctgtattcccgcgaccattcggtggccgagagcctcaactacgtggcgtcctggaacatgagcatgctgcagacccaagacctcgtgaagtcggtccaggccacgactgagaacaaggaactgaaaaccgtcaccttctccaagctctgagagccctcgcgtcccaggccccanccagggggccggccttgtcccgcctcatccacagaaagggaggatgggcgatgacagttgtttctatgccttctgacccagtttcccagtttataactttatgacaatgagtttctcaagcccaaggccttatcttcaccccacaaac

SEQ ID NO: 12905 - DNA, 638 bp, Homo sapiens
tcggcacgaggggccgagcaggaggcgccatcatgggagtggacatccgccataacaaggaccgaaggttcggcgcaaggagcccaagagccaggatatctacctgaggctgttggtcaagttatacaggtttctggccagaagaaccaactccacattcaaccaggttgtgttgaagaggttgtttatgagtcgcaccaaccggccgcctctgtccctttcccggatgatccggaagatgaagcttcctggccgggaaaacaagacggccgtggttgtggggaccataactgatgatgtgcgggttcaggaggtacccaaactgaaggtatgtgcactgcgcgtgaccagccgggcccgcagccgcatcctcagggcagggggcaagatcctcactttcgaccagctggccctggactcccctaagggctgtggcactgtcctgctctccggtcctcgcaagggccgagaggtgtaccggcatttcggcaaggccccaggaaccccgcacagccacaccaaaccctacgtccgctccaagggccggaagttcgagcgtgccagaagccgacgggccagccgaggctacaaaaactaaccctggatcctactctcttattaaaaagatttttgctgac

SEQ ID NO: 12906 - DNA, 668 bp, Homo sapiens
ttcggcacgagggttcgacagtcagccgcatcttcttttgcgtcgccagccgagccacatcgctcagacaccatggggaatgtgaaggtcggagtcaacggatttggtcgtattgggcgcctggtcaccatggctgcttttaactctggtaaagtggatattgttgccatcaatgaccccttcattgacctcaactacatggtttacatgttccaatatgattccacccatggcaaattccatggcaccgtcaaggctgagaacgggaagcttgtcatcaatggaaatcccatcaccatcttccaagagcgagatccctccaaaatcaagtggggcgatgctggcgctgagtacgtcgtggagtccactggcgtcttcaccaccatggagaaagctggggctcatttgcaggggggagccaaaagggtcatcatctctgccccctctgctgatgcccccatgttcgtcatgggtgtgaaccatgagaagtatgacaacagcctcaagatcatcagcaatgcctcctgcaccaccaactgcttagcacccctggccaaggtcatccatgacaactttggtatcgtggaaggactcatgaccacagtccatgccatcactgccacccaaaaaactgtggatggcccctccgggaaactgtggcgtgatgg

SEQ ID NO: 12907 - DNA, 520 bp, Homo sapiens
tcggcacgaggaacagctggtgcccagctgcgtgactgtgcagcgctgtggtggctgctgccctgacgatggcctggagtgtgtgcccactgggcagcaccaagtccggatgcagatcctcatgatccggtacccgagcagtcagctgggggagatgtccctggaagaacacagccagtgtgaatgcagacctaaaaaaaaggacagtgctgtgaagccagacagggctgccactccccaccaccgtccccagccccgttctgttccgggctgggactctgcccccggagcaccctccccagctgacatcacccatcccactccagccccaggcccctctgcccacgctgcacccagcaccaccagcgccctgacccccggacctgccgctgccgctgccgacgccgcagcttcctccgttgccaagggcggggcttaaagctcaacccagacacctgcaggtgccggaagctgcgaaggtgacacatggcttttcagactcagcagggtgacttgcctc

SEQ ID NO: 12908 - DNA, 561 bp, Homo sapiens
tcggcacgaggggtgtttgcagactatgaagcctacatgcagtgccaggcacaggtggaccagctgtaccggaaccccaaggagtggaccaagaaggtcatcaggaacatcgcctgctcgggcaagttctccagtgaccggaccatcacggagtatgcacgggagatctggggtgtggagccctccgacctgcagatcccgccccccaacatcccccgggactaggcacaccctgccttggcgggaccagcgggcatttgttttcttgctgactttgcacctccttttttccccaaacactttgccagccactggtggtccctgcttttctgagtaccatgtttccaggaggggccatgggggtcagggtggttttgagagagcagggtaaggaaggaatgtgctagaagtgctcctagtttcttgtaaaggaagccagagttgacagtacaaagggtcgtggccagccctgcagcttcagcacctgccccacccaaagtgggagtcaggtggagccacctgctgggctcccccagaactttgcacacatcttgctatgta

SEQ ID NO: 12909 - DNA, 585 bp, Homo sapiens
tcggcacgagggcagaggacggcaccacctccaatactttgtgagcagcggttccatcgcagtgaacgccgactcttcggtgcagttgttggccgaagaggccgtgacgctggacatgttggacctgggggcagccaaggcaaacttggagaaggcccaggcggagctggtggggacagctgacgaggccacgcgggcagagatccagatccgaatcgaggccaacgaggccctggtgaaggccctggagtaggcggtgcgtacccggtgtcccgaggcccggccaggggctgggcagggatgccaaggaggccaccagagggcagtgcaggcttctgcctgggccccaggccctgcctgtgtagaaagctctggggactgggccagggaagctcctcctcagctttgagctgtggctgccacccatggggctctccttccgcctctcaagatccccccagcctgacgggccgcttaccatcccctctgccctgcagagccagccgccaaggttgacctcagcttcggagccacctctggatgaactgcccccagcccccgccccattaaagacccggaagcctg

SEQ ID NO: 12910 - DNA, 595 bp, Homo sapiens
ttcggcacgaggtagagatggaagtacattttaataggatgcttcttttctcttcccccagtgcctaggttgccagagcatttgcacaaatgcccctgtttatcaataggtgactacttactacacatgaaccataatgctgcttcttgtgcatgtctgctctgatatacgtcgaacaatgtagcagccactgtcatttctcagtggttttgcctaaccaaacttcttcctaaggagatttatattctggcctacacagcagtccttgatggctgacagccacagaattccaaaccaagtagtgtctgtcagccctcttaactctgtgcacgccctatttcagtcttttacatttgttcttctagggaatgtatgcatctctatatatattttccctctcaaaaccagaacatcaacagtgctgtttctgacacttcagacatcccacgcaaagccacattgaatttttgccaaatgaaaaacacatccaacaatcaagtttctaagaaggtgtcaagtggggaataataataatgtataataatcaagaaattagtttattaaaaggaagcagaagcattgaccattttttccc

SEQ ID NO: 12911 - DNA, 798 bp, Homo sapiens
  misc_feature 484: n = A,T,C or G
gccaagaaagtgctttaatgattataaagtgtccaaaatatactggcagaaataagcggatctgagcgtttctcttcaaacctaggatatgcagggtgagagcatggcaggggctggtgggccccagggttgcctcgaggccggtcgtccagggagagcagcagcaggaagagcctcaggagatgaccctcagggatggcttgtccttctccagggcctgcagccggtcctccatctcctcagaccagtaaatgtcgtacaggaccagctgctccaggaggcagcccggctgccggacgctctccaccagctgcaggatgccggcgtcccccaggcagttgttgctgaggtccagctcacgcaggctgtggttggccaacagggttgcggcgaggctgctgcagctgctgtcactcacatcgcagtcggccaaccagagcacccgcagcacagagccaggctggcccaggccctggcacagctnccgcacgcccgcatcctccagcctgttgttgcttatctgtagctccaggagaaacctgttctgggccagcactgagctgaagtgggagcagcaggcggctgtgaagctgcaggacttcacccacagcgactccagcttgcaggcagggttccagcaggtcttacacaggagtcggggaccctcattccccaagttggtgcccggcagggtgggttctttaggttttctttgtgccgaggacacgcacacaaaccccgaaaccttgggaggagcgccacctccaaacccccggggcctgacctggatctgggtgg

SEQ ID NO: 12912 - DNA, 369 bp, Homo sapiens
tgaaaaaagtggaagcttctaccacacgtgtggcggtatcctcatcgcccccgactgggttgtgactgccggccactgcatctcgagctcctggacctaccagtggtgttgggcgattacgaccgtgctgtgaaggagggccccgagcaggtgatccccatcaactctggggacctctttgtgcatccactctggaaccgctcgtgtgtggcctgtggcaatgacatcgccctcatcaagctctcacgcagcgcccatctgggagacgccgtccagctcgcctcactccctcccgctggtgacatccttcccaacgagacaccctgctacatcaccggctggggccgtctctataccaacgggccactc

SEQ ID NO: 12913 - DNA, 340 bp, Homo sapiens
gagatcggcttctttattacagccagggcccctctggccggagccggggccggggcggggccgtgggaggtgggtgcggagccggaggtgtggagggcggggctgggctccatgggaggtcacaggcccccctaggctggccccggtcccgggttgttgagaacaccatcgatccagtctcggaagagcgccactcgggtgaagaagtcagggcctcggcacagggccccagggaaaaggaggccacgccgtgggccaggccctcgcagacgaggggtgtgccccgtccccctgggcaggcagcagctgtgtcagggcgtcccagggcctggctcccacg

SEQ ID NO: 12914 - DNA, 523 bp, Homo sapiens
cccttccccctccctgcaaatctctctgagtctctttgtgcattggaaaccagaagcagggctggtggtgtcctgggagcagtctggggagctagcatcacaaccctggttttcctctgtgtttgcttcatcttcagagtgaagactaaaacgaagaaagcagcccatccattgcaaaacacggatgatgtgaaccccgtcatggtctcatgctccacgggtcatcattaccagttgcagacaggcatactttcagaccaccctgctgaggctggccccatctcagaatatgagcaggagctccactacgctgtactacacttgcacaaggtgcaacctcaggaaccaaaggtcaccgacactgagtactcacaaatcaagatacacaagtgaagaattgtccaaagccataaccttgattggagagaacatggtacctctcagtgtattggttactagggctgccacaccaatgtaccacaaaccgagtgacataaacacagaactttattttcgtatagtt

SEQ ID NO: 12915 - DNA, 403 bp, Homo sapiens
ttgagggaaggaaacatattatttggaatcaaaggacaataatacgtcaagcaccaaatgctacaaagaaatcatgaaaataggccttaaacgagtcattcctagattaacctccccacatgtgaaaataagtcttggaagtagaaagggtgggtttggttctggtccctagagatgaaaacgtgcagtgactgcagttctgcacttctgggctggtgcgtcttttctgagtggctgttggtggctttgcacgtgaggtcacataactgcttatctcgtcaggaattttgcaagacccctggagagaaaaccagatggaccagtgggaaaggccgcccttgcaagttgctgcttcttttgttcttagtgaagatcagaaaggagcgtgaggctaggcgtggtg

SEQ ID NO: 12916 - DNA, 506 bp, Homo sapiens
ttcggcacgaggccgggactcctcccccgccaccctccgcgcatagggtccttggtctggaccctgccccccaaaatagggccttgctcctctaccttgctctgagcacggagagccctgaccccaccagtaggctcgcccccagaagggcccaagtggccgtctaccgtcaccttccagactcccgcccctaacacccagtggctacagtgcgcctgtcggggcacctggagcgctcacctggttgaattcaaagtcccagaaggccccgctggcgtgaagccggccccttacattttgcgaagtgcattatagtccttgtttttctctccctcgtgggggcaacgacccctcccctggcagtaggggtggggtaggtgactctcgctagatccctccaaagcagaccggtggcgatgtcagcggatgtcacgagctcgttagctgcgttcggggaaggttggggcgtcagggagctctcggatcacagcagcccccgccctctc

SEQ ID NO: 12917 - DNA, 497 bp, Homo sapiens
caacagcaaaacatccacaactctgtaaagctggtgggacctaatgtcaccttaattctgacttgaactggaagcattttaagaaatcttgttgcttttctaacaaattcccgcgtattttgcctttgctgctactttttctagttagatttcaaacttgcctgtggacttaataatgcaagttgcgattaattatttctggagtcatgggaacacacagcacagaaggtaggggggccctctaggtgctgaatctacacatctgtggggtctcctgggttcagcggctgttgattcaaggtcaacattgaccattggaggagtggtttaagagtgccaggcgaagggcaaactgtagatcgatctttatgctgttattacaggagaagtgacatactttatatatgtttatattagcaaggtctgtttttaataccatatactttatatttctatacatttatatttctaataatacagttatcactgatatatgt

SEQ ID NO: 12918 - DNA, 439 bp, Homo sapiens
caagtccccaaagcccgtgaagccagtggaggacgaggatgaggccgggctgcagaagtccctcaagttcaacctgatgagcgatgcccctggggacagtccccgcatccacctgcccctcaactacccaccaggcagccctgacctgggccgccactatcgctctaactccccactgccttccatccagctgcagccccagtcaccctcagcctccaagaagcaccaggtggtacaggacctgccacctgcaaacacattcgtgggcaccggggacaccacgtccacgggctctgagcagtactccgactacagctaccgcaccaacccccccaaataccccagcaagcaggtaggccagccctttcagctcagcacaccccagcccctaccccacccctaccacggagccatctggaccgaggtgtgggagtgatgg

SEQ ID NO: 12919 - DNA, 393 bp, Homo sapiens
tcctgctcaacgggaagtcctaccccggcggcagcacgcttggtttccgaggatgagagcagcttgcggatcttcctggtctcctctgtggccatgtagaacacgtcatccggggcgtcgatccagttcatccgccgccgcttgactgggggcagggagccccccggatcaggcgcactttggtggggtaggacttcccgttgagcaggaggttccggcttggtccctgcagagggggtgcacttcctgggcagccagccaagggccagctccacctcaacctgcagggctcccgctgggaggggccaccagccaaggtgctgtgcctggccaaccccccagcaccccagtgagctacacggacccccagcctggcccagggcagccctgagg

SEQ ID NO: 12920 - DNA, 528 bp, Homo sapiens
  misc_feature 425: n = A,T,C or G
ggctccaggaatcacaggctctaagggtgatatggggcctccaggagttccaggatttcaaggtccaaaaggtcttcctggcctccagggaattaaaggtgatcaaggcgatcacggcgtcccgggagctaaaggtctcccgggtcctcctggccccccaggtccttacgacatcatcaaaggggagcccgggctccctggtcctgagggccccccagggctgaaagggcttcagggactgccaggcccgaaaggccagcaaggtgttacaggattggtgggtatacctggacctccaggtattcctgggtttgacggtgcccctggccagaaaggagagatgggacctgccgggcctactggtccaagaggatttccaggtccaccaggccccgatgggttgccaggatccatggggcccccangcaccccatctgttgatcacggcttccttgtgaccaggcatagtcaaacaatagatgacccacagtgtccttctgggaccaaaattctttaccacgggtactc

SEQ ID NO: 12921 - DNA, 428 bp, Homo sapiens
tcggcacgaggcgcggtttttttttttttttttaaactttccctttttggctgccaaaccatcctcgccggccttctgcttttgggaatcaacatcgtcatcctaataattttaacctgcccgtttgcccgaacctgactaaacttcctaattttaatctccatccttttcctaaccatcaccttttttttcctcctccttttcctccccacctttttccttttttggcagtcagctactgtaaggattttgttcactgaaaataaatttggcctattctaaaacttcatataacggactcacttatgcagtatgtattctgaaagtccctttaactcaccatgttggaatgttcatcagggggttaaacctttgtccctttttatggctgaccagggttctatgtataaatgccacattttaacgtt

SEQ ID NO: 12922 - DNA, 526 bp, Homo sapiens
cacagtctgtggagcatttatttcaaccaggaggtaaccaaatctacatacagtctaaaaacggtagaaaaggtgagtaaaaaggccctcgctccatctagggtggggatggagggtggggatggagggtgggccggggcaagcgtcgtacctggcacccagagaggggctgggcagcaaggacagtgccgagtagagggaggctcgccgagcatgggacggggagggcactgccggcttgccagagcctgtccacctatgcccacggggcaggcagaaaccccgagaccaccccatgtggccagcctggctcagaaaggtccagggctggttcaggggaaaccacagcctggcctggatcctgttagcaagtccaaaccttcacagtgctatccacagcccctgagaagagtcggccccgggacacagccagcgcggtgacactgccctggtgacgcagcagggtctgcgtgcagatcatgttgtccatactccagaccctgagggaccggtcgtaagatgcact

SEQ ID NO: 12923 - DNA, 436 bp, Homo sapiens
  misc_feature 415, 421, 426, 427: n = A,T,C or G
ctcttgttaaaacagggttaaaattggtctgttgttccgcaatcaaagatgttcgaacattttgcatttcttcattctttcttttttcttgctcttcaagttgttctagaaacttagctttttcttcctgaagcttttcttgaagttcagcaactaagcttgaagaatctcctctggtagagtcaatggcaggactttttgctatttgattctcaagatgtttaactttttctaataactctttctcaacaacttctctctccaatttaaattcttttagggcagtctgaatagcttcatctttttcacaattaagcttctgaattaactgttctctgtcttgctcctggctgctgaccaatttttgtctgtctttctcaaggttctggataatagcttcgtatttctcttcttngtgggnaattnnttcatcttt

SEQ ID NO: 12924 - DNA, 547 bp, Homo sapiens
gctggcctttgtctatcctgagcttctggctggtgagttcacccgactggagttccctcggcggctgaagggggatgacttgggacagaaggttttgttcagggatcaccacatgagtggctggagctacaaacgtgtggagaaatcggatctcaagtacccactgatccatggacagggtaggcaggctcggttactaggaacactggctgtctcccggggcctgggagaccatcagctcagagtcctggacacaaacatccagctcaagcccttcttgctctctgtgccacaggtgactgtgctggatgtggaccagctggagctacaggaggatgatgtggttgtcatggcaactgatggactctgggatgtactgtccaacgagcaggtggcatggctggtgcggacttcctccctgggaaccaagaggacccacacaggttctcaaagctggcccagatgctgatacacagcacacagggaaaggaagacagtctcacagaggaagggcaggtgtcctacgatgacgtctctgtgttcgtga

SEQ ID NO: 12925 - DNA, 195 bp, Homo sapiens
tggtacgcctgcaggtaccggtccggaattcccgggtcgacatcatcatgatcgctcgacatcgatacgactttttttttttttttttttttttttggcccggggaaaaaaaaacctttttttttttttaagggggccccttttgtttttttgccaaaaccctttgggaagggggtttttgggggggggattttt

SEQ ID NO: 12926 - DNA, 166 bp, Homo sapiens; identical to SEQ ID NO: 1090

SEQ ID NO: 12927 - DNA, 449 bp, Homo sapiens
tccgcggccaggtgctggcgccgctgcccctcccggagttgctgatcatctgggctgtgatccacaaacccggttctttgtccctcctaatatcaaacagtggattgccttgctgcagaggggaaactgcacgtttaaagagaaaatatcacgggccgctttccacaatgcagttgctgtagtcatctacaataataaatccaaagaggagccagttaccatgactcatccaggcactggagatattattgctgtcatgataacagaattgaggggtaaggatattttgagttatctggagaaaaacatctctgtacaaatgacaatagctgttggaactcgaatgccaccgaagaacttcagccgtggctctctagtcttcgtgtcaatatcctttattgttttgatgattatttcttcagcatggctcatattctacttcattcaga

SEQ ID NO: 12928 - DNA, 647 bp, Homo sapiens
tggatcccccgggctgcaggaagcagatgcagcagatccgcatgtcccttcgcgggaaggctgtggtgctgatgggcaagaacaccatgatgcgcaaggccatccgagggcacctgggaaaacaacccagctctggagaaactgctgcctcatatccgggggaatgtgggctttgtgttcaccaaggaggacctcactgagatcagggacatgttgctggccaataaggtgccagctgctgcccgtgctggtgccattgccccatgtgaagtcactgtgccagcccagaacactggtctcgggcccgagaagacctcctttttccaggctttaggtatcaccactaaaatctccaggggcaccattgaaatcctgagtgatgtgcagctgatcaagactggagacaaagtgggagccagcgaagccacgctgctgaacatgctcaacatctcccccttctcctttgggctggtcatccagcaggtgttcgacaatggcagcatctacaaccctgaagtgcttgatatcacagaggaaactctgcattctcgcttcctggagggtgtccgcaatgttgccagtgtctgtctgcagattggctacccaactgttgcatcagtaccccattctatcatcaacgggtacaa

SEQ ID NO: 12929 - DNA, 306 bp, Homo sapiens
tggatcccccgggctgcaggaattcggcacgaggaccaaatatataaataaagcacgtatcattgaccctggcccttctactaggatgattaaccctggtagggattgccgatgaaatagggacggggaccactgatcttaattaaaacccaccagttagatcatcttcatgccgttatccaaacatacctgaactaagtcgaaaagtcaattaccaacctagacaatcactgacctcgttgaatgaagtagtcctacacaaccgcagaggcctacatttgctattcctagaggatggatgtctct

SEQ ID NO: 12930 - DNA, 515 bp, Homo sapiens
  misc_feature 6, 485: n = A,T,C or G
gcgacncgccttccagagcgaggaccccgcggacccctgtgccctgctccagcgaaggcaggcccaggctgtgacagccgccagcacctgctgtccccagatgcccctgcagaagctgctcttctcagctactctgacccagaaccctgaaaagctgcagcagctgggcctccaccagccccggcttttctccacagggctagcacacaggggcctggaagatacagatggggacggggattcggggaagtatgcctttcctgttgggctcacgcaccactacgtgccctgcagcctcagctctaagccgctggtcgtcctgcacctggtcctggagatgggcttctcgagggttctctgcttcactaactcccgagagaactcccacaggctcttcctgctggtgcaagcttttgggggtgtggacgtggctgagttctcctcgcgctacggggcctggcagaaggaggatgatcctgaagcangtttgaacaggggaagattccaagctgcta

SEQ ID NO: 12931 - DNA, 447 bp, Homo sapiens
  misc_feature 237, 256, 261, 365, 405, 437, 446: n = A,T,C or G
gggagtgggaacgtgcacctcagcggtcgagctcggccgggaccctaggtgcgggggaggcggggtcccggctccgctgcctgcccagacctggcggggatggcccgtgcggctccgggtgtgggacgtatcctgggagcgcccggggttattcccactgactcccgggagtgggtgtgcgcccttcgccccctgcctggtctgtggggatccatcgttgctggagactggaggtcnggggccatgggagcccggnggcanacggtgcgggcctgggtcttgtggaaaggaggagcgaccgcctgagcttgcagcagggacgtcctcctgacctggtaataattaggttggaaggatggtttggngccgtttgcgtaactcagggaacaatggttaaaattgttncccaaacgattacagtttgattttttcccgtnagaaatttnc

SEQ ID NO: 12932 - DNA, 495 bp, Homo sapiens
  misc_feature 88: n = A,T,C or G
tcggcacgagggtgccttcaagctttattgccacacacactcccccagcccttcctgaatggccctgtgcatgggaacaccagcttanagaagcaattcagggctaggcaagggccagaggactggatttgggactggggtgggtaggggggatctggagaaggaaagtgctaagaccaaagcccacccccaccccaggtttccctgagtggtgtccacccccagggtcttgggggctggcttgtgcattggggggagggggctcatcccaaatggatcctcccctggggtctccaggctcatggagggaagataagccccactgagcccctcgcaccccccatgaagccctcaatgtgcagggagcaggaagaagagctgcacacaaacgcatacacatgcttgtctccaagagagctcctggcccctggggctgcccagccaggggctcaacagtccaaaccgatggacacgagcaggtcctcgagtgcccgc

SEQ ID NO: 12933 - DNA, 542 bp, Homo sapiens
  misc_feature 484: n = A,T,C or G
tggacctggcggtccctttctgtgtgaacttccggctgaaagggaaggacatggtggtggacatccagcggcggcacctccgggtggggctcaaggggcagccagcgatcattgatggggagctctacaatgaagtgaaggtggaggagagctcgtggctcattgaggacggcaaggtggtgactgtgcatctggagaagatcaataagatggagtggtggagccgcttggtgtccagtgaccctgagatcaacaccaagaagattaaccctgagaattccaagctgtcagacctggacagtgagactcgcagcatggtggaaaagatgatgtatgaccagcgacagaagtccatggggctgccaacttcagacgaacagaagaaacaggagattctgaagaagttcatggatcaacatccggagatggatttttccaaggctaaattcaactagcccctgttttttcctccctgaactcttgnggctgagctgcaaccacccaactttctttcccactcttctctgggacttgtgggcctc

SEQ ID NO: 12934 - DNA, 646 bp, Homo sapiens
cggcacgaggaggacctgctgcttggacccagcgagagcaatgaccgcctgtcgcagggggcatatgggggcctctcagaccgcccctcggcatccatctcccccagctctgcctccattgccgcctcccattttgactcgatggaactgcttcccccagagttgcccccccgcatccccattgaagagggacccccaacagggacagttcatcccctctcagccccctaccctcccttggacactccggaaacagccacagggtccttcctgttccagggggagccagagggcggtgagggggaccagcccctctcagggtatccttggttccacgggatgctctctcggctcaaggctgcacagttggtgctgactggcggcactggctcccacggtgtcttcctggtgcgccagagtgagacaaggcggggtgaatacgtcctcaccttcaacttccagggcaaggccatgcacctgcgtttgtcgctgaacgaagagggtcagtgccgggtccagcacctgtggttccagtccattttcgatatgctcgagcacttccgggtgcaccccatccctttggagtcgggaggctccagtgatgttgtccttgtcagctatgtcccatcctcccagcgacagcagg

SEQ ID NO: 12935 - DNA, 451 bp, Homo sapiens
tcggcacgagggcaccagtgacatttaaaggcttccgcgagtgaatgagtgcttcttaatcctaaaaacacaatggctgaattatctttctccatgtggcgctgaatcacccatctggtttggagctagagttgcttcctggtgagagaggaagcaactctccttctggttgtctgcctcccctcagatttcctgaaaggctgatggcatgtggctgtgactgtgactgtaatcattgctgaacaacatctctttgaatcaaaggttgattttcccagagggtgctgggtcaggcatttctattaggagttggaaagcaaaaatgggtccatagacactctatggaggtgtccctttctgctctttgctgtgtcctttcagaatttttaccaggaacataatgtggatgtgacttatgaacttaaatataaaataaatagattcttattat

SEQ ID NO: 12936 - DNA, 576 bp, Homo sapiens; identical to SEQ ID NO: 1943
  misc_feature 367, 490: n = A,T,C or G

SEQ ID NO: 12937 - DNA, 526 bp, Homo sapiens
  misc_feature 344, 401: n = A,T,C or G
ttcggcacgagggcctcgttctcaggccggacgctgtgtcacccctcattctggccgctgtatgaagcagcctcgggcaggggtctcaggcccgtggcccctgccacagggcactggaatggacagcaggcgcccccagatgcagggttcccggtggtgtgctgtgaagatgtcttcctctcggaccctctgctgccccgggggcagcgtgttcccctgtacctgtccaaggccccccagcagatgatgggctccctgaaactgctgccgccgccccccatcatgtctgccagggtgctcccccgcccatcaccctcccggggcccctccactgcctggctcancgggccggagctgatcgctctcactggcctgctgcagatgaaccagggggagcctangcccagctcctccgcggttggccccccagaccatacctctgacccacccagcccctgtggtagccccagcagttctcaaggtgctgacctctctctcccacagaccccagacacccattgtccat

SEQ ID NO: 12938 - DNA, 430 bp, Homo sapiens
tcggcacgaggctggcatcttgtccatggcaaatgctggacccaacacaaatggttcccagtttttcatctgcactgccaagactgagtggttggatggcaagcatgtggtgtttggcaaagtgaaagaaggcatgaatattgtggaggccatggagcgctttgggtccaggaatggcaagaccagcaagaagatcaccattgctgactgtggacaactcgaataagtttgacttgtgttttatcttaaccaccagatcattccttctgtagctcaggagagcacccctccaccccatttgctcgcagtatcctaaaatctttgtgctctcgctgcagttccctttgggttccatgttttccttgttccctcccatgcctagctggattgcagagttaagtttatgattatgaaataaaaactaaataac

SEQ ID NO: 12939 - DNA, 516 bp, Homo sapiens
tttatttgtctgtttttgtttgtttaaatatttttaaagtaggattttctttttttttttttttttttaatttatttttttattgataattcttgggtgtttctcacagagggggatttggcagggtcatgggacaatagtggagggaaggtcagcagataaacaagtgaacaaaggtctctggttttcctaggcagaggaccctgcggccttccgcagtgtttgtgtccctgattacttgagatcagggattggtgatgactcttaacgagcatgctgcgttcaagcatttgtttaaccaagcacatcttgcaccgcccttaatccatttaaccctgagtggacacagcacatgtttcagagagcacagggttgggggtaaggtcacagatcaacaggatcccaaggcagaagaatttttcttagtgcagaacaaaatgaaaagtctcccatgtctacttctttctacacagacacggcaaccatccgatttctcaatcttttccccacctttcc

SEQ ID NO: 12940 - DNA, 581 bp, Homo sapiens
ttcggcacgaggaggtggacaaagggatccccagccagagagagagagaccagccaacagcttgatagaccagtgcagccagagagaccaccaaacagagcccccaaaagacagacatctctgctagctggacagccaggtggaccccctaagttagattactagacagatataaacagatcccctgctgaacagatacacagagttctcagaccccacccccaccctcaggtgggctggctggctgacagaccttctggccagacagactcctaaccaaccagatggactgccagacaggcagacatcagccacatggaatcctgacatcccagccagccggccagactctcatcttgatgtcttgatggatggaccccagctagtcagacatgatcctccagattgacagacaagtcccccaaatgagtacacatctccagctattcagacagatggacccccagcaaatcaggacctatctaggcagaccccagccagacccccgccagacagactcccaaccagactgaccccttactattcacacagcctgccgagtagctgggactacaggtcta

SEQ ID NO: 12941 - DNA, 221 bp, Homo sapiens; identical to SEQ ID NO: 1951

SEQ ID NO: 12942 - DNA, 50 bp, Homo sapiens
tcgcgcgcctgcaggtcgacacctagtggatccaaagaattcggcacgag

SEQ ID NO: 12943 - DNA, 308 bp, Homo sapiens
tcggatccatgatcctggctactgtgtgagcctgacctcaagcacaggattccagaaatggaaggatgtgccttgtgaagacaagttctcctttgtctgcaagttcaaaaactagaggcagctggaaaatacatgtctagaactgatccagcaattacaacggagtcaaaaattaaaccggaccatctctccaactcaactcaacctggacactctcttctctgctgagtttgccttgttaatcttcaatagttttacctaccccagtctttggaaccttaaataataaaaataaacatgtttccact

SEQ ID NO: 12944 - DNA, 493 bp, Homo sapiens
  misc_feature 361: n = A,T,C or G
cggcacgaggcaaaacgccattggggcagcccccgtggatggagaattgctgtggagtgtgccaaccttaacgtcatgccggatgtcaccttcaccattaacggagtcccctataccctcagcccaactgcctacaccctactggacttcgtggatggaatgcagttctgcagcagtggctttcaaggacttgacatccaccctccagctgggcccctctggatcctgggggatgtcttcattcgacagttttactcagtctttgaccgtgggaataaccgtgtgggactggccccagcagtcccctaaggaggggccttgtgtctgtgcctgcctgtctgacagaccttgaatatgttangctggggcattctttacacctacaaaaagttattttccaaaaaatgtagctgtttccagggttgcaacttgaattaagaccaaacagaacatgagcatacacacacacacacacatatacacacacacacac

SEQ ID NO: 12945 - DNA, 585 bp, Homo sapiens
  misc_feature 487, 565, 577, 579: n = A,T,C or G
gcggccgcaaccgtcaccccagctcacaatgccagcctgcacccaggcaccgttcacctggcagaccagaggccccccggagtcgtactggcaggcatccccggggccccgggcacacagcatgtcgggctgaaggatgctgcccccggggccgggatagtcccggcggcaggtctctgtgtccaccacggagactttcacctcccgcaggctgtacgggggtggcagaggctctccctcccgcgtatagccccagccggtcaccgagcaccggatcccagggcagaagtcatctgaggccttcgggaggcagacgggcaggatcccgctggtccccggctgtcctgaggggctggagtgcaggatgatctgcctcacggtggagaagtggggagacaaagtgatctccagttcccccaggtgcacctggtagtcggatgagatcagggacccggagaagcagtgggcagctgtgagcacccactgngggctgagcagtgacccgccgcacacgtgcatcctccgcaggcggaggctggcctgccatggccatgcgccggccagngcagcgtgaccncncacgat

SEQ ID NO: 12946 - DNA, 431 bp, Homo sapiens
cggcacgaggatgagctaccacagcggcagtgtcttctctgcccgtgatcgggaccccaacagcttgctcatctcctgcgctgtctcctaccgaggggcctggtggtacaggaactgccactacgccaacctcaacgggctctacgggagcacagtggaccatcaaggagtgagctggtaccactggaagggcttcgagttctcggtgcccttcacggaaatgaagctgagaccaacaaactttcgctccccatcggggggaggctgagctgctgcccacctctctcgcaccccagtatgactgccgagcactgatgggtcgccccgagagaatagccatggtccttcaccacccatccgctggacgaagccttctctgccagcgatctcgcagcactgtgtttacaggggggaggggaggggttcgtaca

SEQ ID NO: 12947 - DNA, 490 bp, Homo sapiens
tcggcacgagcgataagggagagcccggtgaaaagggcccagaggtcttcctggcttaaagggacacaatggattgcaaggtctgcctggtatcgctggtcaccatggtgatcaaggtgctcctggctccgtgggtcctgctggtcctaggggccctgctggtccttctggccctgctggaaaagatggtcgcactggacatcctggtacagttggacctgctggcattcgaggccctcagggtcaccaaggccctgctggcccccctggtccccctggccctcctggacctccaggtgtaagcggtggtggttatgactttggttacgatggagacttctacagggctgaccagcctcgctcagcaccttctctcagacccaaggactatgaagttgatgctactctgaagtctctcaacaaccagattgagacccttcttactcctgaaggctctagaaagaacccagctcgcacatgccgtgacttg

SEQ ID NO: 12948 - DNA, 455 bp, Homo sapiens
gaaccccatggtgcggcacgagtgcgcggaggccctgggcgccattgcccggcccgcctgcctggccgcgctgcaggctcacgcggacgacccagagcgcgtggtgcgtgagagctgcgaggtggctctggacatgtatgagcacgagaccgggcgggccttccagtacgcggacggcctggagcagctgcgcggggccccctcctagggcccacctctcacccggagctcccggaggactcttgagggccgctcctcccccgcagagctttggcgtctaaaccgggtgtgtgtaaataggtgtcatcgcttgtgtcttgctgggcgcacggttgctgtccccctcctccgtctgggaccgaggagctgccgttgtgctgtgactccctgagtcccctgactgctcctcggggcctggcgcagggctgtagcgtggaagtttccaggcttggggt

SEQ ID NO: 12949 - DNA, 457 bp, Homo sapiens
ttttttttttttttttttttttatttttttttctttttttttttttttttttttttttttttttttcaggattccttcaactttaattgtgggggtaaaatcaggcagccactgaagataaaatacggtccctgggagtaatcacaatgctgttttcttttgtaaagtggacataagagtagttttttttttttttattagcgcaagtggtcaaaagttgtcaaaattgtcctcattccccgattgtctcttttttaccagtctcttgcccttcaaacagaggatacctggcctccacatcagcccatgtgatgttgccattggctaggtcttggactatgctgggcagctcagaaatctctgctcttatctgccgcattgagtcacggtccctcagagttgcagtgtggggggtcttgttcactgtgtcaaagtcaatggtgacaccaaaagccac

SEQ ID NO: 12950 - DNA, 530 bp, Homo sapiens
ttcggcacgaggaaaggacttgcaacaaagcattgccagagaacctagtgctccttcaattcctacacctgcgtatcagtccttaccagcaggaggacatgcaccaactcctccaactccagcgccaagaaccatgccgcctactaagccccagcccccagccaggcctccaccacctgtgcttccagcaaatcgagctccttctgctactgctccatctccagtgggggctgggactgctgcgccagctccatcacaaacgcctggctcagctcctcctccacaggcgcagggaccaccctatcccacctatccaggatatcctgggtattgccaaatgcccatgcccatgggctataatccttatgcgtatggccagtataatatgccatatccaccagtgtatcaccagagtcctggacaggctccgtacccgggaccccagcagccttcataccccttccctcagcccccacagcagtcttactatccacagcagtaatatgtctgctcagcagctcagctgattc

SEQ ID NO: 12951 - DNA, 400 bp, Homo sapiens
  misc_feature 300, 316: n = A,T,C or G
acagcaggaggagctgatgaaggccttcgagacgcccgaggagaagcgcgcacggggctggccaagaaggaggccaaggagcgcaagaagcgggagaagatgggctggggtgaggagtacatgggctacaccaacaccgacaaccccttcggagacaacaacctgctgggcaccttcatctggaataaggccctggagaagaaggggatcagccacctggaggagaaggagctgaaggagcggaacaagaggatccaggaggacaaccggctggagctgcagaaggtgaagcagctgcgnctggagcgggaggggnagaaggccatgcgcgacaggagctggagatgctgcagcgcagaaggaggcagagcacttcaagacatgggaggagcaggaggac

SEQ ID NO: 12952 - DNA, 376 bp, Homo sapiens
cagggctggccatgtggccgagcctgctgctgctcctgctgttgccggggcccccgcccgtcgccggcttggaagacgctgccttcccccacctgggggacagcttgcagcccctgccccgggcctgtcccctgcgctgctcctgcccccgaatcgacactgtggactgtgatggcttggaccttcgagtgttcccggacaacatcaccagagccgctcagcacctctccctgcagaacaaccagctccatgaactcccctaccccaaactcccaacacagatggaggcagcaacaataaagccaaacccttccagcactgagcacggaccatgcacccttctggggctctgtccacggactcctccccacaacca

SEQ ID NO: 12953 - DNA, 498 bp, Homo sapiens
ttcggcacgaggaggatttgccagaaactgttccttacttaaaaatttttacagttggacatcaagtgcctgatgatgagactatttttaaattcaaacacgctgttaatgggtttttgaaagaaaataaagataatgataaacttattggtgtccactgtacccatggtttaaacaggactggctacctcatttgcagatatttgattgatgtagaaggcgtgaggccagatgatgcaattgaattattcaataggtgccggggacattgcttagaaagacaaaactacattgaagaccttcagaatggtcctatcagaaagaattggaattccagtgtacccaggtcaagtgattttgaagactcagcacatctcatgcaaccagtccacaataagcctgttaaacaaggacctaggtataatctacatcagatccagggtcactcagctcctcgacatttccacacccagacccaaagtttgcaacaatcagtca

SEQ ID NO: 12954 - DNA, 160 bp, Homo sapiens; identical to SEQ ID NO: 1119

SEQ ID NO: 12955 - DNA, 253 bp, Homo sapiens
tggtacgcctgcaggtaccggtccggaattcccgggtcgacatcatcatcatgatcgctcgacatcgatacgactttttttttttttttttttttttttggggggggggaaaaaaaaacccctaaaaatttttttaggagggggtttttttttttttccaaaagcccttgggaccgggggctttggggggagaaaccttggaaaccgtaagccctttttccccccccggaaaaaaaaaagggggggcccttta

SEQ ID NO: 12956 - DNA, 339 bp, Homo sapiens; identical to SEQ ID NO: 274

SEQ ID NO: 12957 - DNA, 558 bp, Homo sapiens
  misc_feature 45, 368, 436, 469, 495, 532, 553: n = A,T,C or G
tcagcattttcaaagcactttattgagttcctgcgccatcctggngaagctggccgcactgggggaatgggacacaatcttgccttccatgccccagccactctctcactgcggaatcaccaaggagggaaagatgagtccctgagcaatcaggaaacggtgtgctcccggatccaggccaggtagtaggccacatcggtgtagacgcctggcttgttgcggtcaccacagcccgatccccagctgatgatgccttgcagggtgagccggcgctctgcagcttggtcctcacacaccagcgggcctccggaatcaccctgggtcggaaacacgcagctcagcgctgtgggacctgagatttgtgcctnacggccttcggggaagggcgccaaccgggctaagagctcacctggcacgcatcggtgccgccctcgangaaccctgcgcagagatgccggggaggatggangatccgtgcacgtccggggcttaagnagcgctccagggagaggaacggtacttgggcctctgnagaaactggaatatcctccgnccctt

SEQ ID NO: 12958 - DNA, 422 bp, Homo sapiens
ccgccgcccgcctgtgtgtccccagagccatggagagagccagtctgatccagaaggccaagctggcagagcaggccgaacgctatgaggacatggcagccttcatgaaaggcgccgtggagaagggcgaggagctctcctgcgaagagcgaaacctgctctcagtagcctataagaacgtggtgggcggccagagggctgcctggagggtgctgtccagtattgagcagaaaagcaacgaggagggctcggaggagaaggggcccgaggtgcgtgagtaccgggagaaggtggagactgagctccagggcgtgtgcgacaccgtgctgggcctgctggacagccacctcatcaaggaggccggggacgccgagagccgggtcttctacctgaagatgaagggtgactactaccgctacctg

SEQ ID NO: 12959 - DNA, 380 bp, Homo sapiens
  misc_feature 3, 13, 82, 280, 303, 318, 338, 354: n = A,T,C or G
ttncggcacaggnatcgctcaccccgcagcttcctggccaagaagctgcagctggtgcgtagggtggggccccccccggtangattggcatctccccctgcaccctccccggctccaccgccatctcccccatcatcaagaacgccatctccctgccccagctcaaccaggccgcctacgacagcctcgtggttggcaagctcagcttcgacagcagccccaccagctccacggacggccactccagctacggcctggactctgggttctgcaccatctnccgcctgccccgctcggaaaagncgcatgcaccgagancgggatggttccttcccctntgaggcccgggctttngcgcttctgcactttgtcttgtcctt

SEQ ID NO: 12960 - DNA, 455 bp, Homo sapiens
tactctcaggctgcgtgcagcgacagtgcccatggctctgatgtgtctctcacagcttgaaaagcctgatacagctgtcttgtgagggactgacatgcatgatttcttcacgcctcccctttgtgacttcaagaacctctggcatctctttctgcaaaggcacctgaatgtgtctgcgtccctgttagcataatgtgacgaggtggacagacagcccacccttgtgtccactgtgacccctgttcccatgctgacctgtgtttcctccccagtcatctttcttgatccagagaggtggagctggatgtctccatctctgtctcaactttacgtgcactgaactgcaacttcttacttccctactgaaaatgagaatctgaatataaatttgttttctcaaatatttgctatgagaggctgatggattaattaagcggccgcaagcttattccctt

SEQ ID NO: 12961 - DNA, 511 bp, Homo sapiens
  misc_feature 308: n = A,T,C or G
agcctctctcttctgatggcccccacctgctccgggacggcccccttacccctgctgcttcagggtttttccccggcgggttgggaggggcaggaggtggggtggaaatagggtgggctcctttcctcaggtagagtggggggccaaaacctctgcagtccccggcagtgagctatggactttcttccccctcacaaggctgggggcctcctgctctcgtccctggccctccctgcacagggcaaagccagtctgggctctggcacacagagttcatgtttgcgccctctccctgcccctcaccccanagggtgaggaggaatgaggggcattggtggttaggccggttggctgtcttgaacagctggagggaagatgcaggggtgggaagcggccaggcagaaagagctccaggctcttgtgtcgcccacccagccctcccatactcactcctgacagctttcctgcactgcagcttcctgctcctctgactctagtgggaacaggcccc

SEQ ID NO: 12962 - DNA, 473 bp, Homo sapiens
  misc_feature 187, 200, 261, 320, 325, 424, 445, 452: n = A,T,C or G
gttctgaggttgcttttattccaagaactctgtgagctccgcccagataccattggcgcctgcttgtgtccccaggggcctacacacaacagcaccagcaccatgagggcgctctcgacccacacaagccctggtccccgtcagtcaatgtgactgagtccgccattgaggccagtctggctggccncaagtggtccctntgagtccccaactccctgggccagcaaggagtgaagctccatgccccttggtccacgcctntagagtctgaggcatatcctgcagcctcgatctcaggagggcaacgcatgcagcccccntgcantcagaaagggggtttctccagttcgtgggtttttctttctttgttccacaagtttccagatgggcccctccttgggaggcccttgcccagggagggganacgggccaaatttttcggggnagagcanaggagttcaccgttttttcgt

SEQ ID NO: 12963 - DNA, 500 bp, Homo sapiens
cggcacgaggataataagtaataaactggaacttagagcagaattaccaggatagtgggagaaatctgaaaccatatcatatggaaaatggtgaaggctctagtaatatttattccatgctgttgacaccaatttaaaagttatctttaaatacttgaagagttatgtaaagattagatttttgactcaatatacaacaaattgtaaattctattacaaaaatagaatatactgtcttataagtcctcttctattaatattattattaaaacagaactaaatggaagggtggtaattaataaagattcaagctaacgtatggggcccggcatgttggctcatgcctgtaatcccagcctgaccaacatgaggttgaagcgggcagatcacttgaggtcaggagtttgagaccagcctgaccaacatggtgaaatcccatctctactaaaaatacaaaattagctgggcatggtggtgcacgcccataatcccagctactc

SEQ ID NO: 12964 - DNA, 516 bp, Homo sapiens
cgtcgcgtacctaggatgccgcgtggaagccgaagccgcacctcccgcatggcccctccggccagccgggcccctcagatgaaagctgcacccaggccagcaccagtcgctcagccaccagcagcggcacccccatctgcagttggctcttctgctgctgcgccccggcagccaggtctgatggcccagatggcaaccactgcagctggcgtggctgtgggctctgctgtggggcacacattgggtcacgccattactgggggcttcagtggaggaagtaatgctgagcctgcgaggcctgacatcacttaccaggagcctcagggaacccagccagcacagcagcagcagccttgcctctatgagatcaaacagtttctggagtgtgcccagaaccagggtgacatcaagctctgtgagggtttcaatgaggtgctgaaacagtgccgacttgcaaacggattggcctaatgaagaagttcaacctggagagatggaaaatcagctctcataact

SEQ ID NO: 12965 - DNA, 635 bp, Homo sapiens
tcggcatgaggggcttcaggagggagcggagcagccattctccaggccccgtggttgcccctggacgtgtgcgtctgctgctccggggtggagctggggtgtgggatgcacggcctcgtgggggccgggccgtcctccagccccgctgctccctggccagcccccttgtcgctgtcggtcccgtctaaccatgatgccttaacatgtggagtgtaccgtggggcctcactaacctctaactccctgtgtctgcatgagcatgtggcctccccgtcccttccccggtggcgaacccagtgacccacggacacgtggggtgtgctgctgctgctccccagcccaccagtgcctggccagcctgcccccttccctggacagggctgtggagatggctccggcggcttggggaaagccaaattgccaaaactcaagtcacctcagtaccatccaggatgctgggtattgtcctgcctctgccttttctgtctcagcgggcagtgcccagagcccacacccccccaagagccctcgatggacagcctcacccaccccacctgggcccagccaggagccccgcctggccatcagtatttattgcctccgtccgtgccgtccctgggccactggcctggcgc

SEQ ID NO: 12966 - DNA, 434 bp, Homo sapiens
ttcggcacgagggtccctctggtggttggggatggagcggcagcaaggggtgtaatggggctgggttctgtcttctacaggccaccccgaggtcctcagtggttgcctggggagccggacggggctcctgaggggtacaggttgggtgggccctccctgagggtctggggtcaggctttggcctctgctgcctctcagtcaccaagtcacctccctctgaaaatccagtcccttctttggatgtccttgtgagtcactctgggcctggctgtcgtccctcctcagcttcttgttcctgggacaagggtcaagccaggatgggcccaggcctgggatcccccaccccaggacccccaggccccctcccctgctgctttgcggggggcagggcagaaatggactccttttgggtccccgaggtggggtcccctccc

SEQ ID NO: 12967 - DNA, 390 bp, Homo sapiens
tcggcacgaggctgacttccgagagctgtaggtgaagtgaggaccaggcagcagtccagagctgtgaggccccaggcccacaggaatggaatgaagaaagacctgttccacacaaggaggggttttctagtggaagctgagcttggaagctcctggagccaagtttaccacaggataggcaggtacagccgcccagtgtgtgcagtgtgtgcccactctggtgcttggacaagaagttcaagtccctttcacgtttacaattgtgaaaacaacaaaacaataccttcctggaaagtaggaagacaaagcagaaatgtgaattggaaatacagccaactattttacgaaaaactaattagcaagcatctgattaaacttattcagaaactg

SEQ ID NO: 12968 - DNA, 627 bp, Homo sapiens
ttcggcacgagggcctggccgagctgagcagcctgagtgtcctgcgtctcagccacaattccatcagccacattgcggagggtgccttcaagggactcatgagcctgcgagtcttggatctggaccataacgagatttcgggcacaatagatgacacgagcggcgccttctcagggctcgacagcctcagcaagctgactctgtttggaaacaagatcaagtctgtggctaagaaagcattctcggggctggaaggcctggagcacctgaaccttggagggaatgcgatcagatctgtccagtttgatgcctttgtgaagatgaagaatcttaaagagctccatatcagcagcgacagcttcctgtgtgactgccagctgaagtggctgcccccgtggctaattggcaggatgctgcaggcctttgtgacagccacctgtgcccacccagaatcactgaagggtcagagcattttctctgtgccaccagagagtttcgtgtgcgatgacttcctgaagccacagatcatcacccagccagaaaccaccatggctatggtgggcaaggacatccggtttacatgctcagcagccagcagcagcagctcccccatgacctttgcctgga

SEQ ID NO: 12969 - DNA, 618 bp, Homo sapiens; identical to SEQ ID NO: 2028
  misc_feature 85, 515: n = A,T,C or G

SEQ ID NO: 12970 - DNA, 50 bp, Homo sapiens
attcttaacctctttccctcaacaacattgctggttcctctatgctatgc

SEQ ID NO: 12971 - DNA, 508 bp, Homo sapiens
tttgtagacaaaagctttttattagctaactatatgaaaggataaacactgtaataattcatgtgattcaaaatgggcaaaagcaaaagactagcttcccctcaagaagaaaaatttcagacctatgaaaaggacaacaatactaataaaaaaaattgtatttacttagaagcattcagaatgtcaacaaaacagctgcaacttttttttttttttgcaattacagagtggtattcagttaacagaacaacaattatttcgtataagctgcatcagagacaactgaagatgaaaaaactaccatccccatatataactaatttgtgctgtgcaccaacaagaacctgctttaaatttccatgccaatttacaacccccatactgtaccaggcaaggttagtggctattgaaaataccaccaggacagggctatctaaagacacattcggtagtgtgttaactatacaaaaaaagacactgtacagtttaaaaacaaatcttacacagc

SEQ ID NO: 12972 - DNA, 589 bp, Homo sapiens
ggggccgtttccgcaaacagaatcgcgtttggctgtgctggatgtgtgaacctattgggtactgtacaacttcaagcctcgaaatcagataggcaccaccaacctcatttcctgtttcaccttgattttctgtgataccaaaatctcagcttcacaaagtcattgaaagtgttggttcatgaagttttaccatcaattcaagtaatcataaatggcaaattctgcaaaagcagaagaatatgaaaagatgtctcttgaacaggcaaaagcgtcagtgaattctgaaacagagtcttcattcaatattaatgaaaacacaacagcttctgggactgggctttctgaaaagacttctgtctgtaggcaagtagacatagcaagaaagagaaaagagtttgaagatgatcttgtaaaggaaagttctagttgtgggaaagacactccatccaagaagagaaaacttgatcctgaaattgtcccagaggaaaaagattgtggtgatgctgaaggcaattcaaagaaaagaaaaagagaaactgaggatgttccaaaagataaatcttctactggagatggcactcaaaataag

SEQ ID NO: 12973 - DNA, 499 bp, Homo sapiens
acagaagggggacaatttaggaattttaaactttagatgatcatttggttccatttttatttcatttttatttttgttaatgcaaacaggacttaaatgaactttgatctctgttttaaagattattaaaaaacattgtgtatctatacatatggctcttgaggacttagctttcactacactacaggatatgatctccatgtagtccatataaacctgcagagtgattttccagagtgctcgatactgttaattacatctccattagggctgaaaagaatgacctacgtttctgtatacagctgtgttgcttttgatgttgtgttactgtacacagaagtgtgtgcactgaggctctgcgtgtggtccgtatggaaagcctggtagccctgcgagttaagtactgcttccattcattgtttacgctggaatttttctccccatggaatgtaagtaaaacttaagtgtttgtcatcaataaatggtaatactaaatttt

SEQ ID NO: 12974 - DNA, 311 bp, Homo sapiens
gggggtttgctgccagcggcgtgagcttcggccgccattttacaacagctccactcgcgccggacacagggagcagcgagcacgcgtttcccgcaacccgataccatcggacaggatttctccgcctcagcccaacggggagatctctggaaacatggctacagaacatgttaatggaaatggtactgaacagcccatggatactacttctgcagttatccattcagaaaattttcagacattgcttgatgctggtttaccacagaaagttgctgaaaaactagatgaaatttaccttgcagggctagttg

SEQ ID NO: 12975 - DNA, 584 bp, Homo sapiens
acagaaggggagagcgccagagccgagtcagccataaagctacgcgctaggctcttggccctgacgtgaggcgcgcagagatggcgtaacgggaatagttttcaacgtctatttcattccctgcttcagaggacctctttaatctttgattttggtccctgtttctaagaaaagcaactgaaaaggtcgtaataccgcccctgagaaaaaaggagcagcgctaaataatcgagaaaatgcctcctcttgaaacggatatagagatggaaacaagatataagaaggattgagaatcatataatacaggagcttaaacacctatgcgcgatgataaagagggtactattagagcgcttggaaaataccaggaagttgagagagttaacagaagggcgcacgctggattggccacaaaatcgaattactgaaggccactactgattaggacacttatggagaacgtgggtagcactgaagcagcattctagtttccagtgccgtcaacctcatacgtatctacctggtctctgatcgaagctaccgtaatgtgttcttgaggtcaacatgttttgtggaagtcactg

SEQ ID NO: 12976 - DNA, 571 bp, Homo sapiens; identical to SEQ ID NO: 2040

SEQ ID NO: 12977 - DNA, 628 bp, Homo sapiens
  misc_feature 394: n = A,T,C or G
accatagccagtgggggtgtgttacccaacatccaccccgagttgctagcgaagaagcggggatccaaaggaaagttggaagccatcatcacaccacccccagccaaaaaggccaagtctccatcccagaagaagcctgtgtctaaaaaagcaggaggcaagaaaggggcccggaaatccaagaagaagcagggtgaagtcagtaaggcagccagcgccgacagcacaaccgagggcacacctgccgacggcttcacagtcctctccaccaagagcctattccttggccaaaagctgaaccttattcacagtgaaatcagtaatttagccggctttgaggtggaggccataatcaatcctaccaatgctgacattgaccttaaagatgacctangaaacacgctggagaagaaaggtggcaaggagtttgtggaagctgtcctggaactccggaaaaagaacgggcccttggaagtagctggagctgctgtcagcgcaggccatggcctgcctgccaagtttgtgatccactgtaatagtccagtttggggtgcagacaagtgtgaagaacttctggaaaagacagtgaaaaactgcttggccctggctgatgataagaagctgaaat

SEQ ID NO: 12978 - DNA, 529 bp, Homo sapiens
gcggaagcgttggaggacattccctgttgactgcgtcgcgatgtgtggcgactgtgtggagaaggaatatcccaaccggggtaatacctgcctggagaatggatctttcttactgaactttacaggctgtgcagtgtgcagtaagcgggattttatgctgatcacaaacaaatccttgaaagaagaagatggagaagaaatagttacctatgatcatttgtgtaagaattgtcatcatgtaatagccagacatgagtatacattcagtatcatggatgaatttcaggagtataccatgctgtgtctgttatgcggcaaagccgaagatactatcagtattctccctgatgacccccgacaaatgactctcttattctaaggatccttctacagatctgttataactatattgtgttggtttacaatacagcaagcctgatggtttgtcttatttcattcatactgaaaattctttgcatattttttttctgcttagacttacttattctttgaggaaaaaaggtaatgt

SEQ ID NO: 12979 - DNA, 614 bp, Homo sapiens
gcaggctcgcggcgggcgctgggcgcgggatccgactctagtcgtaatggaggcgggcggctttctggactcgctcatttacggagcatgcgtggtcttcacccttggcatgttctccgccggcctctcggacctcaggcacatgcgaatgacccggagtgtggacaacgtccagttcctgccctttctcaccacggaagtcaacaacctgggctggctgagttatggggctttgaagggagacgggatcctcatcgtcgtcaacacagtgggtgctgcgcttcagaccctgtatatcttggcatatctgcattactgccctcggaagcgtgttgtgctcctacagactgcaaccctgctaggggtccttctcctgggttatggctacttttggctcctggtacccaaccctgaggcccggcttcagcagttgggcctcttctgcagtgtcttcaccatcagcatgtacctctcaccactggctgacttggctaaggtgattcaaactaaatcaacccaatgtctctcctacccactcaccattgctacccttctcacctctgcctcctggtgcctctatgggtttcgactcagagatccctatatcatggtgt

SEQ ID NO: 12980 - DNA, 434 bp, Homo sapiens
atgtgtgttatttgtttccctgtttttttggtaggtcttatataaaacaaacattcctttgttctagtgttgtgaagggcctccctcttcctttatctgaagtggtgaatatagtaaatatacattctggttacactactgtaaacttgtatgtagggtgatgaccctctttgtcctaggtgtaccctttcctcatctctattaaattgtaaacaggactactgcatgtactctctttgcagtgaatttggaatggaaggccaggtttctataacttttgaacaggtactttgtgaaatgactcaatttctattgtggtaagctcattggcagcttagcattttgcaaaggaattgctttgcaggaaatatttaattttcaaaaacataatgattaatgttccaattatgcatcacttcccccagtataaatca

SEQ ID NO: 12981 - DNA, 464 bp, Homo sapiens
ggtggtcagagcgagcttcggagaagcagtggtgggttccatgtgatggtggagtaggaggcaggtctccgcggttcatctgtgttgctctaaatgacactgcttcattattttgatggctggagaatatttcctagtgtatgtatatgagagtttcttgatctctttatctgtggatgaacagctactttgaaacatatggtacatttgtgttaaggctagtcaccctgctgtggaatagaaggccagaattgatcagtctcatctgagagtaactttgtacccatcactgattccttctgagactgcctccacttccccagcagcctctggtttcttcatgtggctgcagatggcaggatttcccaaaggtttctggctgaaacatattccgtggtgtatctgtacagcagtttcctcatccctgcagctgtgtttgaacaggtcatttaccatgctgtcct

SEQ ID NO: 12982 - DNA, 145 bp, Homo sapiens
gtggacacaagcgaaatggtcaacggcgctacagaacaaaggacgaggtgtaaagagtccagccccatcccctccccgacctctgatcgtaaagccaagactgccctcccagcccagagtgccgccaccttaccagccagaaccc

SEQ ID NO: 12983 - DNA, 586 bp, Homo sapiens
gtaatctaaatggacattcaattgggcaatatagaatacatgctggaaaaacagtgccgattgtgaaaggaggggaggcaacaagaatggaggaaggagaagtatatgcaattgaaacctttggtagtacaggaaaaggtgttgttcatgatgatatggaatgttcacattacatgaaaaattttgatgttggacatgtgccaataaggcttccaagaacaaaacacttgttaaatgtcatcaatgaaaactttggaacccttgccttctgccgcagatggctggatcgcttgggagaaagtaaatacttgatggctctgaagaatctgtgtgacttgggcattgtagatccatatccaccattatgtgacattaaaggatcatatacagcgcaatttgaacataccatcctgttgcgtccaacatgtaaagaagttgtcagcagaggagatgactattaaacttagtccaaagccacctcaacacctttattttctgagctttgttggaaaacatgataccagaattaatttgccacatgttgtctgttttaacagtggacccatgtaatacttttatccatgtt

SEQ ID NO: 12984 - DNA, 254 bp, Homo sapiens
atattattcttcaacgacattttttgtaactttacacttttttggttattttattttaaaaaaatgaaaaattaatttaaaaaaatgcaaaaaactgttggattatttattttagaaattcccccctttgtgttggactgcaaattgagtttctttctctttaggcctttcacaactaggactgagaatgtatgtaaaagttctgtgacagtacagaaggaaaacaactttttatgtatagcttctaaaagggg

SEQ ID NO: 12985 - DNA, 407 bp, Homo sapiens
gcataaactgtcacctgaagagtacgtattagctgccatcagcctctacttggatatcatcaatctattcctgcacctgttacggtttctggaagcagttaataaaaagtaattaaaagtatctcagctcaactgaagaacaacaaaaaaaatttaacgagaaaaaaggattaaagtaattggaagcagtatatagaaactgtttcattaagtaataaagtttgaaacaatgattaaatactgttacaatctttatttgtatcatatgtaattttgagagctttaaaatcttactattctttatgatacctcatttctaaatccttgatttaggatctcagttaagagctatcaaaattctattaaaaatgcttttctggctgggcacagtggctcacgcctgtaat

SEQ ID NO: 12986 - DNA, 487 bp, Homo sapiens
acgacagaagggtacggctgcgagaagacgacagaagggtacggctgcgagaagacgacagaagggtacggctgcgagaagacgacagaagggtacgggtgcgagaagacgacagaagggtacggctgcgagaagacgacagaagggtacggctgcgagaagacgacagaagggtacggctgcgagaagacgacagaagggatgtgtaggccgggcatggtggctcacgcctgtaatcccagcactttgggaggccaaggcgggtgaatcacaaggtcaggagttcaagaccaacctggccaagatggtgtgaaaccccatctctactaaaaatacaaaaattagctgggcatggtggcaggcgcctataatcccacctactagggagactgaggcagagaattgcttgaacccaggaggcggaggttgcagtgagccgagcttgatcacagcactccaggctgggcgacagagcgagacttggtct

SEQ ID NO: 12987 - DNA, 587 bp, Homo sapiens
acagaagggatgcaatcatcagcgaggcctggcggctagtggaggaaggaatcgtgtctcctagtgacctggaccttgtcatgtcagaagggttgggcatgcggtatgcattcattggacccctggaaaccatgcatctcaatgcagaaggtatgttaagctactgcgacagatacagcgaaggcataaaacatgtcctacagacttttggacccattccagagttttccagggccactgctgagaaggttaaccaggacatgtgcatgaaggtccctgatgacccggagcacttagctgccaggaggcagtggagggacgagtgcctcatgagactcgccaagttgaagagtcaagtgcagccccagtgaatttcttgtaatgcagcttccactcctctcattggaggccctatttgggaacactgcaagcccttaatcagccctctgtgacataggtagcagcccacggagatcctaagctggctgtcttgtgtgcagcctgagtggggtggtgcaggccggtagtctgcccgtcactttggatcatagccctgggcctggcggcacagcagcacttgcgttctc

SEQ ID NO: 12988 - DNA, 509 bp, Homo sapiens
ctgttttgaatatagccagagaaaaaagatggagaaaaaactaggacagtgtcttctcagaaaccaccaaccttgaaggctacaagtgatgaggaagattctgttttgagtatagccagagaaaacaaggatggaagaaaaatctaggacagtgtcttctgagaaaccatcaggcttgaaggctacaagtgacgagaaagattctgttttgtatatagccagagaaaaaaaggatggagaaaaatctaggacagtgtcttctcataaacaaccagcattgaaggctatctgtgacaaggaagattctgtcccggaatatggccacggaaaaaaaggatgaacaaatatctgggacagtgtcttgtcagaaacaaccagccttgaaggctacaagtgacaagaaagattctgtttcgaatatacccacagaaataaaggatggacaacaatctggaacagtgtcttctcagaaacaaccggcctggaaggctacaagtgtcaagaaagat

SEQ ID NO: 12989 - DNA, 508 bp, Homo sapiens
gattgtatgatatatttataaatgctataaagaaatattgtgtttcatgcattcagaaatgattgttaaaattctcccaactggttcgacctttgcagatacccataacctatgttgagccttgcttaccagcaaagaatatttttaatgtggatatctaattctaaagtctgttccattagaggcaattggcacatctttctatactttatatacttttctccagtaatacatgtttactttaaaaattgttgcagtgaagaaaaacctttaactgagaaatatggaaaccgtcttaattttccattggctatgatggaattaatattgtattttaaaaatgcatattgatcactataattctaaaacaattttttaaataaaccagcaggttgctaaaagaaggcattttatctaaagttattttaataggtggtatagcagtaattgtaaatttaagagttgcttttacagttaacaatggaatatgccttctctgctatgtctg

SEQ ID NO: 12990 - DNA, 477 bp, Homo sapiens
tgcctcaatattctttatctgcctcttcctacacatcgggcgaggcctatattacggatcatttctctactcagaaacctgaaacatcggcattatcctcctgcttgcaactatagcaacagccttcataggctatgtcctcccgtgaggccaaatatcattctgaggggccacagtaattacaaacttactatccgccatcccatacattgggacagacctagttcaatgaatctgaggaggctactcagtagacagtcccaccctcacacgattctttacctttcacttcatcttgcccttcattattgcagccctagcagcactccacctcctattcttgcacgaaacgggatcaaacaaccccctaggaatcacctcccattccgataaaatcaccttccacccttactacacaatcaaagacgctatctacgtagatccagacatgataagatacattgatgagtttggaca

SEQ ID NO: 12991 - DNA, 77 bp, Homo sapiens
acagaagggcatgaagggggaaggccaggatatatacccacttttttttttttttttttgaaacaaactctcaggct

SEQ ID NO: 12992 - DNA, 419 bp, Homo sapiens
gagaacggcttccggcgggagctgtgcagctccttatcatggggacaattcatctctttcgaaaaccacaaagatccttttttggcaagttgttacgggaatttagacttgtagcagctgaccgaagggtaagttattccttaaccccaattttaattattgcacaaacaacattataacattgaagaaagataatttttaaggccaatagaaatcactcctgatcctgtcacactgttttcatttttctatgttggaaaagtatttttttagtgtaaaattgcagttgtttggtgttaagttgttttactttggtaggaagcttctgttaaagttttgattctaattctgaagtgttttaaagaaaaatggttttgtggttgctttttgttattaagttttcaaaaaattaaatggat

SEQ ID NO: 12993 - DNA, 480 bp, Homo sapiens
ggaggagagcatgagtgtgtagaggagaaaactaaagttgccaaagttagccaaggagtagaagatgggcccgacaccaagagagcaaaacttgattcttctgagacaacgatggtcaaaaagaaggtggtcttctgccctgttaaagaagccctggaggtggactggagcagtgagaaagcaaaggctgctctgaagcgcacgacctccgactactttctccttcaagtgctcttaaagttccgtacagataaaggaagagatcccagttctgatacatatgaggaagattctgagctgttgctccagatacgaaatgatgtgcttgactcactgggtattagtcctgacctgcttcctgaggactttgtcaggtactgcttctccgagatggccccagtgtgtgcggtggttggagggattttggcacaggaaattgtgaaggccctgtctcagcgggaccctcctcacaacaacttc

SEQ ID NO: 12994 - DNA, 449 bp, Homo sapiens
ggatcatagctcactgcagcctgaaactccttggcttccacctcagcctcccaaagcattgggattataggcgtgagccactgcacctggccaagtaatttcttttaggaataaaaggtacttggcattccttatttgggaagtaattacagtcttatctttttttttcttttttcttttttttaataaaatctaccagtaatttaaatgtgagctttttatgtctgtcatcattctgccccctttgcctttaaaacttacaaaaatacgtgtttgttatttgagaaagcatgtttaaaaattgcagatgagaaatattgtcgttaataattatgtactgtcttaatgtgggcacttcatttgttagtataatactagataatagcagcctagttctttaggatttgacgattcaaattttttttttgttttttgtttttgtttttttt

SEQ ID NO: 12995 - DNA, 512 bp, Homo sapiens
gattttcaagacttacactagaactgtgagaacagggtaataaataagcatatgtattaatatcacctttggtcaactcttgggtagccccaacggtagtgtaggaattaacgtaatttttcctactaaaagtattggatttgttttgagagaccacagttgaaaatcattgacatacaaagtttaaaaattgttaggttaaaaaattttaaatgcatttgaagtggttttatagaaaaataattatctaacttggtttatattgacaggttgttttcttggataagaactagacgaagagaaagggagattagtgataaatgtccaggttttcaagttgaaaagtaacaatcagtgtattacaacagatggatgtgatgtcaaattacaaatgctgaaaacgttatatgtaatcatgtagccagagtaatcatacaaggcaaagaacggaaaggcatccaaataggaaagaggctggagtgcagtggcaccatctcggctcactgcaacct

SEQ ID NO: 12996 - DNA, 325 bp, Homo sapiens
taatcccagctactcggaggctgaggcaggataatcgcttgaaaccgggagacagaggttgtggtgagccgagatcacgccattgcactccagccggggcaacaagagcaaaactccatctcaaaaaaaaaaaaaaaaaaaaaagggaaaaaaccaaccaaccaccatttttaaaccctagaaaaattttggaacttgtggaacaaaaaaggggaatttgtatttaagggggaaaaaaacccttacttttattttactggggaaaaacttgccccacagaggacttaaccccttaaaaaaaagggagggaacttgtttggctttt

SEQ ID NO: 12997 - DNA, 521 bp, Homo sapiens
gagtaagaagccagcagggctggtgctggggcttcttctcctgaaggggctgcaagagggaaggcttagccatgtcgtccttgatcagaagggtgatcagcaccgcgaaagccccaggggccattggaccctacagtcaagctgtattagtcgacaggaccatttacatttcaggacagataggcatggacccttcaagtggacagcttgtgtcaggaggggtagcagaagaagctaaacaagctcttaaaaacatgggtgaaattctgaaagctgcaggctgtgacttcactaacgtggtgaaaacaactgttcttctggctgacataaatgacttcaatactgtcaatgaaatctacaaacagtatttcaagagtaattttcctgctagagctgcttaccaagttgctgctttacccaaaggcagccgaattgaaattgaagcagtaactatccaaggaccactgacaacggcatcactataagtgggcccagtgctgtgtagtctggaattgttaaca

SEQ ID NO: 12998 - DNA, 570 bp, Homo sapiens
acagaagggctgctttccaactgcctgactgcttgttcgtctcactggtgtgagctccagcatcccctttgctcgaaatggaccccaactgctcttgcgccactggtaagggaagctctgcgccctggaatccccatttcccagccctattacagagggtctctgggtttcaggaagtcgcattttaagttctgagcgacggggactccagtacttcgttagatgctttcttcctgatcacgcccctgagagcattgccctcatccctgggcctctacgtcagagttaagaatactgaggctcaaggctgaactgctccacatcacccagttggtcatgggcctgctggctgggccccagtgctctgtccaggctctgagcaatcagtgtggttgggggtgctggaaacattgactcttcagagttcaggacagaaggttctggctcgcagtctcaatattcctgggttgtatgtgcacgtgggaccttcctggtgcggtaaaacaggagggtccttgcccttcccagcgttagtggagaggacatggggcttctgttcctctgtcctga

SEQ ID NO: 12999 - DNA, 535 bp, Homo sapiens
gacagaggggaaattgggaaaaacagtggtctaggattgcctcattgctgcatagaaaatcagcaaagcagtgcaaagccagatggtatgaatggctggatccaagcattaagaagacagaatggtccagagaagaagaggaaaaactcttgcacttggccaagttgatgccaactcagtggaggaccattgctccaatcattggaagaacagcggcccagtgcttagaacactatgaatttcttctggataaagctgcccaaagagacaatgaagaggaaacaacagatgatccacgaaaacttaaacctggagaaatagatccaaatccagaaacaaaaccagcgcggcctgatccaattgatatggatgaggatgaacttgagatgctttctgaagccagagcccgcttggctaatactcagggaaagaaggccaagaggaaagcaagagagaaacaattggaagaagcaagacgtcttgctgccctccaaaatagaagagaacttcgagcagctggcatagaaattcagaa

SEQ ID NO: 13000 - DNA, 477 bp, Homo sapiens
acagaagggggacagggctgggctcttcagaacagaagcatggatctcggaatccctgacctgctggacgcgtggctggagcccccagaggatatcttctcgacaggatccgtcctggagctgggactccactgcccccctccagaggttccgggccttcaagagagtgagcctgaagatttcttgaagcttttcattgatcccaatgaggtgtactgctcagaagcatctcctggcagtgacggtggcatctctgaggacccctgccatccagacagtccccctgcccccagggcaaccagttctcctatgctctatgaggttgtctatgaggcaggggccctggagaggatgcagggggaaactgggccaaatgtaggccttatctccatccagctagatcagtggagcccagcatttatggtgcctgattcctgcatggtcagtgagctgccctttgatgctcatgcccacatc

SEQ ID NO: 13001 - DNA, 590 bp, Homo sapiens
tacgagcccgcgggatcctcggagagtatggaacccttcccctccgctctcagccggaggccagctgcgtccagccgggctcggtcttctgaacaccgatttcaaatcaggtccccggggcccagcgtcacttagggaagtggtggcattttgtggttgctgctaaatcacggagagcagccttggcactgccggtcccaacttgatccaaggagccttgagaaggagatgagattcagtaccaggggccggccgtggctcccatcctccggaatctgcaaaatggctacttcttcagaaataatggggagagggatggcaagaggccagagatcaaggccctcgagtattaacttgagcatttgggcacaaaatagacacttttggattttcccgtcttttccaacaccaaggatgagattatcaaaagatgtgttaaattaatttgtaccggccgggcgcggtggcttacgcctgtaatcccaacactttgggaggccgaggcgggcgaatcacaaggtcatgagttcgaaaccagcctggccaatatggtgaaacccccgtctctactaaaggtacagaaattagcc

SEQ ID NO: 13002 - DNA, 186 bp, Homo sapiens
aagcttgcggccgcggtttttttttttttttttttttttttttttttggggggaacctaaaatttttttttaaaaaaaaaatggggtctttttgaaaaaaccggaaaaccttggggtttaaacctggtaaccaaactttttttttttttttaaccccgaaaagggcggaattttggggtttggggt

SEQ ID NO: 13003 - DNA, 502 bp, Homo sapiens
aagatacagttgctgggacccagccctattgattgtaattcaaaaactgaggtggggcctgatttagctccatcattggaatccattccgatttgaaactctctgggttggacagttcaagagagatcctaaagaaagcaaaatcactgtggactgaaatgagtagacaaggttttctgagcatggtgaaatatgatctgggcctcgcttgggagggctgtggccaggccttgagtccttggctcagtgggaccttctgaaacagcctccaagctgcacccctgcttcctttgcttttggatgaccccctccagcagctttggtgctgatgggaataagtcgacctgcagcggaagttcagcccaagtctcagcccagcagcctccccaaacctggccagggtctggtcatgctgccgtctctgcggttctctgtggagttgtggtttctgtaccttgaagagaacttccccttctgggacccagaaacccaatgaaccctc

SEQ ID NO: 13004 - DNA, 506 bp, Homo sapiens
atttgaccaaagagctgctggccctggattcagtggaccccgagggacgagccgatgtgcgtcaggccaggagagacggtgtcaggaaggttcagaccatcttggaaaaacttgaacagaaagccattgatgtcccaggtcaagtccaggtctatgaactccagcccagcaaccttgaagcagatcagccactgcaggcaatcatggagatgggtgccgtggcagcagacaagggcaagaaaaatgctggaaatgcagaagatccccacacagaaacccagcagccagaagccacagcagcagcgacttcaaaccccagcagcatgacagacacccctggtaacccagcagcaccgtagcctctgccctgtaaaaatcagactcggaaccgatgtgtgctttagggaattttaagttgcatgcatttcagagactttaagtcagttggtttttattagctgcttggtatgcagtaacttgggtggaggcaaaacactaataaaagg

SEQ ID NO: 13005 - DNA, 517 bp, Homo sapiens
gcttctcgcctaacgctgccaacatggtgttcaggcgcttcgtggaggttggccgggtggcctatgtctcctttggacctcatgccggaaaattggtcgcgattgtagatgttattgatcagaacagggctttggtcgatggaccttgcactcaagtgaggagacaggccatgcctttcaagtgcatgcagctcactgatttcatcctcaagtttccgcacagtgcccaccagaagtatgtccgacaagcctggcagaaggcagacatcaatacaaaatgggcagccacacgatgggccaagaagattgaagccagagaaaggaaagccaagatgacagattttgatcgttttaaagttatgaaggcaaagaaaatgaggaacagaataatcaagaatgaagttaagaagcttcaaaaggcagctctcctaaaagcttctcccaaaaaagcacctggtactaagggtactgctgctgctgctgctgctgctgctgctgctgctgctgctaaagttcc

SEQ ID NO: 13006 - DNA, 519 bp, Homo sapiens
gggacaattactctacagctcagaacagcaactgctgaggctgccttgggaagaagatgatcctaaacaaagctctgatgctgggggccctcgccctgaccaccgtgatgagcccttgtggaggtgaagacattgtggctgaccacgttgcctcttacggtgtaaacttgtaccagtcttacggtccctctggccagttcacccatgaatttgatggagacgaggagttctatgtggacctggagaggaaggagactgtctggaagttgcctctgttccacagacttagatttgacccgcaatttgcactgacaaacatcgctgtgctaaaacataacttgaacatcctgattaaacgctccaactctaccgctgctaccaatgaggttcctgaggtcacagtgttttccaagtctcccgtgacactgggtcagcccaacaccctcatctgtcttgtggacaacatctttcctcctgtggtcaacatcacctggctgagcaatgggcactcagtcacag

SEQ ID NO: 13007 - DNA, 596 bp, Homo sapiens
gcatgatgggacacgagtggatccggaacatgaacctccacagcctgccgcacggccaccaccagcctttctataacgtgctggtggaggacggctcctgtcgatacgcagcccaagaaaacttggaatataacgtggagcctcaagaaatctcacaccctgacgtgggacgctatttctcagagtttactggcactcactacatcccaaacgcagagctggagatccggtatccagaagatctggagtttgtctatgaaacggtgcagaatatttacagtgcaaagaaagagaacatagatgagtaaagtctagagaggacattgcacctttgctgctgctgctatcttccaagagaacgggactccggaagaagacgtctccacggagccctcgggacctgctgcaccaggaaagccactccaccagtagtgctggttgcctcctactaagtttaaataccgtgtgctcttccccagctgcaaagacaatgttgctctccgcctacactagtgaattaatctgaaaggcactgtgtcagtggcatggcttgtatgcttgtcctgtggtgacagtttgtgacattctgtcttcat

SEQ ID NO: 13008 - DNA, 193 bp, Homo sapiens
aacagcgtgggtgagttgtgaggggcaggaagcatgtcttaatggacttaaccaattttcgtcaactattcacagtaaaatctttcaatgtacaaaatttagtaatctgataaacaataaacaaaatatttgaataggcatttttcataagacgtacaaagggcagacaggcatacgaaaaggtgctcaacat

SEQ ID NO: 13009 - DNA, 558 bp, Homo sapiens
ggctcccttcccctactcatcgcactaatttacactcacaacaccctaggctcactaaacattctactactcactctcactgcccaagaactatcaaactcctgagccaacaacttaatatgactagcttacacaatagcttttatagtaaagatacctctttacggactccacttatgactccctaaagcccatgtcgaagcccccatcgctgggtcaatagtacttgccgcagtactcttaaaactaggcggctatggtataatacgcctcacactcattctcaaccccctgacaaaacacatagcctaccccttccttgtactatccctatgaggcataattataacaagctccatctgcctacgacaaacagacctaaaatcgctcattgcatactcttcaatcagccacatagccctcgtagtaacagccattctcatccaaaccccctgaagcttcaccggcgcagtcattctcataatcgcccacgggcttacatcctcattactattctgcctagcaaactcaaactacgaacgcactcacagtcgcatc

SEQ ID NO: 13010 - DNA, 453 bp, Homo sapiens
ggcgaggcccctgcagcagcagcggcgtggtcagagcgagcttcggagaagcagtggtgggttccatgtgatggtgtagtaggaggcaggtctccgcggttcatctgtgttgctctaaatgacactgtttcattattttgatggctggagaatatttcctagtgtatgtatatgagagtttcttgatctctttatctgtggatgaacaggctagtcaccctgctgtggaatagaaggccagaattgatcagtctcatctgagagtaactttgtacccatcactgattccttctgagactgcctccacttccccagcagcctctggtttcttcatgtggctgcagatggcaggatttcccaaaggtttctggctgaaacatattccgtggtgtatctgtacagcagtttcctcatccctgcagctgtgtttgaacaggtcatttaccatgctgt

SEQ ID NO: 13011 - DNA, 594 bp, Homo sapiens
acagaagggatttagtatttcatttaactttattgtggcttttacataaacatattcagttgtacttgttttaaattgtatacaagctgtacataaaattagccaaatgaatcatttcttatatcttattcatgaaagtttgcatacagatttttgcatatatgcctttttgaatttttgctggttaacctttatcatttatctttgtaatgtgaacatgcttcagagtgtaccttttgccataacctattttaatttactttttctgaagtttggagtgataatttttagtggaagcaatttgtaatttaagttggtagttatattatatatagaaaagattttttagttaaacttctggacatgagcgtcctgtttaaatttcttgttaatatcgtgccaagcctcaaaaataggcttattccatggaacaagaattaaaaatgaataagctatcaatatataatttaagtacaagtttaggctgggcgtggtggctcacgcctgtaatcccagcactttgggaggccgaggtaggcagatcacgaggtcaagagatcaagaccagcctgaccaacgtggcgaaacctcgtc

SEQ ID NO: 13012 - DNA, 542 bp, Homo sapiens
gacagagggggtggagcgccaaagctgctaagtgcgtcagttgtggagtggcgtagacgagttaagtcctggtctgcgtggaggtcgacgactccgtcgcagactacggacctgtctgggtctcagccgccaaagaccccgtccggtaggaagtactagccggacatcatgagtggctgtcgggtattcatcgggagactaaatccagcggccagggagaaggacgtggaaagattcttcaagggatatggacggataagagatattgatctgaaaagaggctttggttttgtggaatttgaggatccaagggatgcagatgatgctgtgtatgagcttgatggaaaagaactctgtagtgaaagggttactattgaacatgctagggctcggtcacgaggtggaagaggtagaggacgatactctgaccgttttagtagtcgcagacctcgaaatgatagacgaaatgctccacctgtaagaacagaaaatcgtcttatagttgagaatttatcctcaagagtcagctggcaggatctcaa

SEQ ID NO: 13013 - DNA, 521 bp, Homo sapiens
ggggcacgcgccgctgcggtgctcaggaacagcccatggaagaatcatatgaagaggtggtgacttaggtcgtaagcaggagtggacatgtttggatttccaacagctaccctgctggactgtcatggaagatatgcccagaatgtagcgttcttcaatgtgatgactgaagcccaccacaaatatgaccactctgaggctacaggatcctcaagctgggatatccaaaattctttcagaagagagaagctggaacaaaaatccccagattcgaagacactacaggaagattcacctggagtgagacaaagggtctatgagtgccaggagtgtggaaaatccttccggcaaaaagttagtctaacgttacatgagagaatccacactggtcaaaagccttttgagtgcacccactgtggaaaaagcttcagggccaaaggcaatcttgttacacatcaacggatacacacgggagagaagccttatcagtgcagggagtgtgggaaaagcttcagtcaacg

SEQ ID NO: 13014 - DNA, 359 bp, Homo sapiens; identical to SEQ ID NO: 2119

SEQ ID NO: 13015 - DNA, 506 bp, Homo sapiens
gacttccgcttccgctggggaggtcctccatgcgcagtcatgagtcgcttcaagtttatcgatattggtatcaacttgactgaccctatgttcagaggaatttataggggggttcaaaagcatcaagatgacttacaggatgtaatagggagagctgtcgagattggtgttaaaaagtttatgattacaggtggaaatctacaagacagtaaagatgcactgcatttggcacaaacaaatggtatgtttttcagtacagttggatgtcatcctacaagatgtggtgaatttgaaaagaataaccctgatctttacttaaaggagttgctaaatcttgctgaaaacaataaagggaaagttgtggcaataggagaatgcggacttgattttgaccgactgcagttttgtcccaaagatactcaactcaaatattttgaaaaacagtttgaactgtcagaacaaacaaaattaccaatgtttcttcattgtcgaaactcacatgctga

SEQ ID NO: 13016 - DNA, 355 bp, Homo sapiens
ggctgacggctgtctctggactggacagcagtggcgtccgcttttctctaaggaacccgataagaactccattttctgttgatgtggagacatagggtacctccaactttccggggtttcagaagacaattttttattgaaactggaagaccaaaataattacaagcatgttgtgctggggaaatgcgtcctttgggcagctaggtttgggtggaattgatgaagaaattgtactagagcccagaaaaagtgacttctttataaataaaagggtccgagatgtaggatgtggactcagacatactgtgtttgttctggatgatggaacagtgtacacatgtggatgtaatgatct

SEQ ID NO: 13017 - DNA, 480 bp, Homo sapiens
gcatcagggactaccatctgagccgccacattctgactcacacaggagaaaagccgtttgtttgtgcagccaatggctgtgatcaaaaattcaacacaaaatcaaacttgaagaaacattttgaacgcaaacatgaaaatcaacaaaaacaatatatatgcagttttgaagactgtaagaagacctttaagaaacatcagcagctgaaaatccatcagtgccagcataccaatgaacctctattcaagtgtacccaggaaggatgtgggaaacactttgcatcacccagcaagctgaaacgacatgccaaggcccacgagggctatgtatgtcaaaaaggatgttcctttgtggcaaaaacatggacggaacttctgaaacatgtgagagaaacccataaagaggaaatactatgtgaagtatgccggaaaacatttaaacgcaaagattaccttaagcaacacatgaaaactcatgccc

SEQ ID NO: 13018 - DNA, 567 bp, Homo sapiens
ggcttttcagtcgggcgctgagtggtttttcggatcatgtctggtggctccgcggattataacagagaacatggcggcccagagggaatggaccccgatggtgtcatcgagagcaactggaatgagattgttgataactttgatgatatgaatttaaaggagtctctccttcgtggcatctatgcttacggttttgagaagccttccgctattcagcagagagctattattccctgtattaaagggtatgatgtgattgctcaagctcagtcaggtactggcaagacagccacatttgctatttccatcctgcaacagttggagattgagttcaaggagacccaagcactagtattggcccccaccagagaactggctcaacagatccaaaaggtaattctggcacttggagactatatgggagccacttgtcatgcctgcattggtggaacaaatgttcgaaatgaaatgcaaaaactgcaggctgaagcaccacatattgttgttggtacacccgggagagtgtttgatatgttaaacagaagatacctttctccaaaatggatc

SEQ ID NO: 13019 - DNA, 389 bp, Homo sapiens
catttcttaggttttttttttggtttttttttgggttggttggtttttggtttaaaaaaaaacaggattttgttttgtttcccaggttggaacacaggggggggatcttagttaattgaaccctgaaactctttggtttccacctaaccctcccaaagctttggaattttaggcgtgacccattgcccctggccaagtatttttttttaggaataaaaggtccttggctttcttttttgggaaagaaataacagcctaaccttttttttcctttttcctttttttaaaaaaaacctcccagtatttaaaaggggacctttttatgttggcaatattttggcccctttggcttttaaaatttacaaaaatccgggttggtttttggaaaa

SEQ ID NO: 13020 - DNA, 605 bp, Homo sapiens
gacagaaggattctttatctgcctcttcctacacatcgggcgaggcctatattacggatcatttctctactcagaaacctgaaacatcggcattatcctcctgcttgcaactatagcaacagccttcataggctatgtcctcccgtgaggccaaatatcattctgaggggccacagtaattacaaacttactatccgccatcccatacattgggacagacctagttcaatgaatctgaggaggctactcagtagacagtcccaccctcacacgattctttacctttcacttcatcttgcccttcattattgcagccctagcagcactccacctcctattcttgcacgaaacgggatcaaacaaccccctaggaatcacctcccattccgataaaatcaccttccacccttactacacaatcaaagacgccctcggcttacttctcttccttctctccttaatgacattaacactattctcaccagacctcctaggcgacccagacaattataccctagccaaccccttaaacacccctccccacatcaagcccgaatgatatttcctattcgcctacacaattctccgatccgtccctaacaact

SEQ ID NO: 13021 - DNA, 447 bp, Homo sapiens
ggtggaaactttggtggaagaggaggctatggtggtggaggtggtggcagcagaggtagttatggaggaggtgatggtggatataatggatttggaggtgatggtggcaactatggcggtggtcctggttatagtagtagagggggctacggtggtggtggaccaggatatggaaaccaaggtggtggatatggtggaggtggaggatatgatggttacaatgaaggaggaaattttggcggtggtaactatggtggtggtgggaactataatgattttggaaattatagtggacaacagcaatcaaattatggacccatgaaagggggcagttttggtggaagaagctcgggcagtccctatggtggtggttatggatctggtggtggaagtggtggatatggtagcagaaggttctaaaaacagcagaaaagggctacagttctt

SEQ ID NO: 13022 - DNA, 365 bp, Homo sapiens
cactttgggaggccgaggtgggtggatcacaaggtcaggagttcgagaccagcctggccaatatggtgaaaccccgtctcttctaaaaaaatacaaaaattagccgggtatggtggcgcatgcctgtagtcccagctactggggaggctgaggcaagaaaattgcttgaactcgggaggcggaggtcgcagtgagccgagatcgtgccactgcactccagcctgggtgacagagtgagactttgtctcaaagaaaaaaaaacaataataggtaaagtatttaaggaattctcagatgccttatggacctcttcaaaaatgtggttagccaattgattcaacttttataggtttatatgctctcat

SEQ ID NO: 13023 - DNA, 489 bp, Homo sapiens; identical to SEQ ID NO: 2130

SEQ ID NO: 13024 - DNA, 523 bp, Homo sapiens
taagcgaatagctaaagaaaggcaaaagcagtataactgcctgacacagcggattgaacgagagaagaaattgttcgttattgctcagaaaattcaaacacgcaaagatcttatggataaaactcagaaagtgaaggtgaagaaagaaacggtgaactccccagctatttataaatttcagagtcgtcgaaaacgttgacgtgttatagataagccttgtcattctgtatcaaaaatctgttgtcgttttctagtaacttcaaattccattactccaaatggcatggttttccggtttgtaaccataactaaattgtcagtctgacatttaatgtctttctatggacaacattaaatctccctcccttctgtaattgtttttggattgtgaaattagtcttatttttatatacttaattttttttttctttgagatagggtctttgttgccaggctggaagtgcagtgtgtgattatggctcactgcaactttgaactcctgggctcaagtgatcttcctgca

SEQ ID NO: 13025 - DNA, 626 bp, Homo sapiens
ggaccccccagcaagtcgttttgtgtctccttggactgagttaagttacaagcctttcttatacctgtctttgacaaagaagacgggattgtctttacataaaaccagcctgctcctggagcttccctggactcaacttcctaaaggcatgtgaggaaggggtagattccacaatctaatccgggtgccatcagagtagagggagtagagaatggatgttgggtaggccatcaataaggtccattctgcgcagtatctcaactgccgttcaacaatcgcaagaggaaggtggagcaggtttcttcatcttacagttgagaaaacagagactcagaagggcttcttagttcatgtttcccttagcgcctcagtgattttttcatggtggcttaggccaaaagaaatatctaaccattcaatttataaataattaggtccccaacgaattaaatattatgtcctaccaacttattagctgcttgaaaaaataatacacataaataaaaaaatatatttttcatttctatttcattgttaatcacaactacttactaaggagatgtatgcacctattggacactgtgcaacttctcacctggaatgagattggacactgctgccctcat

SEQ ID NO: 13026 - DNA, 72 bp, Homo sapiens
gcttttacctcgttgcactgctgagagcaagatgggtcaccagcagctgtactggagccacccgcgaaaatt

SEQ ID NO: 13027 - DNA, 522 bp, Homo sapiens
aacaatttcaagaacctttattgaaaccaacattcaaataatatctcaagggtgaaatgtttcagcaaaaccaatttaacaattccaaatatatataaaaacatgtaattttcttgaaggtgataatttacccctcccccattttatctgctatacttcattgcaccaaatagggaagactgtttaatcatctgcaccaaaaaaaaccccctgcattttgacaagtgtaaatgtcaaaaatcccatcaaatcagagtataattataggcttaatatactataactaaggcttccaatactacagtccagaaacccagtgtgaattttcccattttcaggtctcccaaaagcttgactgctggattaagaaggcacaggggccattacttacgacaaagtgacgcagtacttcggaaaagtaggaacgggcagtgccagcgagcttctactgacttaagcagggtgcccggctggatcagcgtgagagagtgctctgctggctcctgtttctgagttgggccc

SEQ ID NO: 13028 - DNA, 620 bp, Homo sapiens
agggaacttaggctgcggaactatgtcccggaggatgaggacctgaagaagaggagggtgccccaggccaaaccggttgcagtggaggagaaggtgaaggagcagctggaggccgccaagcccgagcccgtcatcgaggaggtggacctggccaacctcgctcctcggaagcctgactgggacctcaagagagatgtggccaagaagctggagaaactaaaaaagcggactcagagggccattgccgagctgatccgtgaaaggctgaaaggccaggaagacagcctagcctctgcagtggatgctgccaccgaacaaaagacctgtgactccgactgaggcatgccctgccccaccactcgcccatcaggcctgtcctgcagaggatggtcttgggcagggatgggggctaggcttgccatcacctccagtttggcttctgagcagagactccctgcccatcaagtctgaaacccccatggatgaggtcagctccttgtctgctgggtggcccctgccattctgaatggaggcagaaccagcaacaactctgggcgtgcctgtgtctgcacatgtggatgtacatatgtctgtatatatgtatatattttgaactttct

SEQ ID NO: 13029 - DNA, 486 bp, Homo sapiens
ccatctgtcttcatcttcccggcatctgatgagcagttgaaatctggaactgcctctgttgtgtgcctgctgaataacttctatcccagagaggccaaagtacagtggaaggtggataacgccctccaatcgggtaactcccaggagagtgtcacagagcaggacagcaaggacagcacctacagcctcagcagcaccctgacgctgagcaaagcagactacgagaaacacaaagtctacgcctgcgaagtcacccatcagggcctgagctcgcccgtcacaaagagcttcaacaggggagagtgttagagggagaagtgcccccacctgctcctcagttccagcctgaccccctcccatcctttggcctctgaccctttttccacaggggacctacccctattgcggtcctccagctcatctttcacctcacccccctcctcctccttggctttaattatgctaatgttggaggagaatgaataa

SEQ ID NO: 13030 - DNA, 483 bp, Homo sapiens; identical to SEQ ID NO: 2139

SEQ ID NO: 13031 - DNA, 142 bp, Homo sapiens
gttattacctctgtttacacatgaaaacactgaggctcagagatgttaagtaacttggccagagtgctacagctggtaaacttgaacttgagactagaagccaggtcttatcccaacatggctatttctctgcagctttgga

SEQ ID NO: 13032 - DNA, 341 bp, Homo sapiens
acgacagaagggtacggctgcgagaagacgacagaagggtacggctgcgagaagacgacagaagggtacggctggcgagaagacgacagaagggttcggctgcgagaggacgacagaagggtacggctgcgagaagactacagaagggtacggctgcgagaagactacagaagggtacggctgcgagaagacgacagaagggtacggctgcgagaagacgacagaagggtacggctgcgagaagactacagaagggttcggctgcgagaagacgacagaagggtacggctgcgagaagacgacagaagggtacggctgcgagaagacgacagaagggttcg

SEQ ID NO: 13033 - DNA, 592 bp, Homo sapiens
  misc_feature 529: n = A,T,C or G
ggttttgattgatgttttctgaggccctagaggagtttgtatcaatttgtgagtattaatgtcagtactaccagcactttgccaaaactgtcagagggacccgtttctagagtgagtcccagttacatcaaacagtgacttccagttattccccagtaagtctgagtggttccttcaagctgggtgtctttccagcctttgccagtctagccccagcagggcaccgtgtatgaatgcagtttggtgctgttttagagtatgcctgctccccagccccctgcctggaaccctctgagcaacttgctctgacctataatgtcttaggtgcaacacggaccccaccagagctcttggatacccccctagatccatgtggctttatgtgaggggactgaatgcagacacgccatagcccccttctactactttccctctcgccctgccacctagttccacatggaaccaacaagttgagtgcatccctgttgggcgttttgtgttgagactggctgaaatgaggagactttgnaccatgtgacgtgtcaacagactcaaggagacaaccacctcaactgggtcatgtggcatgcct

SEQ ID NO: 13034 - DNA, 570 bp, Homo sapiens
acagaaggggtataaatatcatgcacagtgttcaactgtaattcaaaaattaccagtgatggatacagaaaaatgtgacatgtaattttttttaaaagtccatggaaatagattcctcgatgattcagaagttgtagacaaggactttaaagcagaaattataaatatattcaggattttaaaaaaatatgttttcaggcccggtgcggtagctcacgcctataatccaccagatgtggtggcgtatgcttataatcccagctactcagaaggctgaggcatgagaatagatagcttgaacccaggaggtggaggttgcagtgagccgagattgctccactgcactctagcctgggcaacagagtgagaccctgtctctaaaaatatatgtatatatatagtcataatgagggaacagatgagaaaataagcagagaaatgaaaattttcaaaaataagtaaaaagttaaggtataatacctgaaatttttttgaagagtcattgaagtggcttacaatagattgtagatggcagaagaaagtgtcagtaaacttgaatacaggtcaata

SEQ ID NO: 13035 - DNA, 479 bp, Homo sapiens
aagctttgggtgggctctggcatcagcactttcactaagcttcacagataattctgatgcatactccaggcctgaaccactgatcaatttgaaacatgcataacaaagcaaaaaaagttttgtttcaccttttgaaatacagttaactcttttaccatgccagagatcattcagagagacaggtcgttgctccggagtgatacagatctggcagtacccagcccttgtgtgtgtgcgttagctcagcacctgcccacactgcgagcccccgtaggatgtgccttgtccttccctgtttcagcacttaacacactacctggtacagagtatgtagtgggcatctgttgaatgaatgcttttcccagtagcagtgtattcatacaatattaatataattgtcccctggcttacagataaaaatgaaagcatcaagtgcccagtgagtgagacccaggtgttcttcctccacccctagtggt

SEQ ID NO: 13036 - DNA, 411 bp, Homo sapiens
acagtatcttgttgcaagtccaaatcaggggagactttgttaatatgtatcttttgctcaaatttagtagggttttttttttttggattaagggcttttcaaatttggaatttgtaaaacccatttaaaaaaatacccttcctaaaaaccaaattgacacagctggcccccctgctagccaacccgcagttcccagttcccacctgctgaaagttcaaaactcaaaccgtaggtgggggcttatgaaactgtgcttcatgaaaaaaagcaaatttccaaattcaaactgttggagggagccaaggggacaaaccctccatgagtgcactttcttccaaaaaatccccagatttaccccatagaggtctgggattacctggaatataatatgaaaaacattttttaggctgg

SEQ ID NO: 13037 - DNA, 629 bp, Homo sapiens
atagctgctactggaacactattatgacctaatttatgagccatccttactcatctacaagtgctgaagcaatgttacatacttttttgctaaactcagattttttagcctaatttcttgtcctcctatccacctgcatccacacatggcctgcatggggctgccttccctgcagtgttctacagccatgcttcagggtatagctgttggtggacagcctcaggtcttgggggcactatagccactaaacgaggtgtgaaaggctcaagaggatgaccagcaattaattatccccagaaagtgaaggaaaagagacctttagggatgttgctggtcaagtcttgatttgaccggagtcaaatcaatcttcaagcaatcttggaatcctcaactgcagtaagcatttcaaaatgcaaacaaactgcttaacaactgacaagacaccagcccatacgctgctcttccacagtgggttctagctttgaacaaaagtgctaaacatttccttgaatatattcttcctctttttgtcctcatcactcaatactggtgctcttgtcacaggtagaacagcttgtttcttttccatctattcaagtgtgtttctaattctaaatgctgatcttctc

SEQ ID NO: 13038 - DNA, 572 bp, Homo sapiens; identical to SEQ ID NO: 2152

SEQ ID NO: 13039 - DNA, 236 bp, Homo sapiens
gcacaaaatactgaaggtgaaatccactgattgcaatgcaatgggacaatatatctggaagcaattttatccaaaaaaatcaatagctttaaaacaattcacaaccttggacctaatacctctacttctaggaagctagcctatgaaggtttctgctgaaggatgtttatcacagtattatttataatgtgaaaaagccaaaaaggagacctaaaatgtttcaaaaataaaaatgg

SEQ ID NO: 13040 - DNA, 383 bp, Homo sapiens
aaattcctgagcggtgctctgccaacttttcaaggggagggatttggatggctgtgttactgcacactggatctggaattgttcagggttatgagtgacaaatttcttaaacaccagcagcactgagatgtgcactatgggcattcgtacagttgttgtccaaatgcaaacaactttttcatcttggagaagctgagatacagagttcaatagaactacttggaatattttgagaaggttgaatgtttcatctttggctttgttgtctctggagtggggaagtatggagggcttttttttttttaaagagagtgtgtatgtactttttctctctataagggccagggtgttggtcaaattcaccatcgattaatttatatctt

SEQ ID NO: 13041 - DNA, 553 bp, Homo sapiens
gtgggttggtgtttgcactccaaagagttgctgtgatttccctgtatctgtctttctggcttgttagatcttctcatttggcgtcctttctccgaagagttaaccaagacgtttggcatggtttccttgctttcctcctatcttttgctgctagagctgctttcgaaaagaagtcttttcttgcagtggtatcttttctttgggttacagtgttgttcatcctttctttgccgaaagaatgaatcccagtgcttcacgaggttaaaggaaagatctgctggtagtgtttagtctttgttctgagctgatattgttagtagctttttgtttttaaattttattagtaaaatttcaccagtgaaccagaagctctttttttctgttgtgaaatgctagctttaagatttctagaactttgtgtcaaagaaatctttgaaaagttactgaagtatacagagaggttcacaattttaaatgtgcaggtggtccgggcgcggtagatcacacctgtaatcccagcactttgggacgccaaggtgggcggatcacttga

SEQ ID NO: 13042 - DNA, 426 bp, Homo sapiens
gtggatcagacagtctaaagatcctaaaaacttgccaactggatctttgtttagcaaactcactggaaatgaacacttaatggaatttttaagtctgttctgttaggtagatggtgatgctcttgttattttcacttattcagactggattacttcttacttagttactaactcaatgaggaaaaatccctacaggatctttttttgcaaacaactgatatatgcagacaaatttttgacaaattcaccttttaaacacacttaaccatttgtgaaggttttctttagcttacattttaaacatacacaataaacactaatcctccaaactttcactgtttttattagtatgaatataaaatttgaaggtttggccaattagtacaagtctcatgatataatcactgcctgcatacatatgcacag

SEQ ID NO: 13043 - DNA, 383 bp, Homo sapiens
tacggctgcgagaagacgacagaagggtacggctgcgagaagacgacagaagggtacggctgcgagaagacgacagaagggtacggctgcgagaagacgacagaagggtacggctgcgagaagacgacagaagggtacggctgcgagaagacgacagaagggtacggctgcgagaagacgacagaagggtacggctgcgagaagacgacagaagggtacggctgcgagaagacgacagaagggtacggctgcgagaagacgacagaagggtacggctgcgagaagacgacagaagggtacggctgcgagaagacgacagaagggtacggctgcgagaatacgacagaagggtacggctgcgagaagacgacagaaggggaatg

SEQ ID NO: 13044 - DNA, 543 bp, Homo sapiens
actgtctttaagctgttggccattgccatggtggcattaattcctggaaccctcattaaaaaatttagtcagaaacatctgcaattgaatgaaacaagtactgctaatcatatacacagtagaaaagacacatgatctggattttctgtttgccacatccctggactcagttgcttatttgtgtaatggatgtggtcctctaaagcccctcattgtttttgattgccttctataggtgatgtggacactgtgcatcaatgtgcagtgtcttttcagaaaggacgctctgctcttgaaggtgtattacatcaggttttcaaaccagccctggtgtagcagacactgcaacagatgcctcctagaaaatgctgtttgtggccgggcgcggtggctcacgcctgtaatcccagcactttgggaggccgaggccggtgattcacaaggtcaggagttcaagaccagcctggccaagatggtgaaatcctgtctctaataaaaatacaaaaattaagccaggcgtggtggcaggcacctgtaatccca

SEQ ID NO: 13045 - DNA, 551 bp, Homo sapiens
ggcccggaagaagcgaccaaagcgcctgaggaccggcaacatggtgcggtcggggaataaggcagctgttgtgctgtgtatggacgtgggctttaccatgagtaactccattcctggtatagaatccccatttgaacaagcaaagaaggtgataaccatgtttgtacagcgacaggtgtttgctgagaacaaggatgagattgctttagtcctgtttggtacagatggcactgacaatcccctttctggtggggatcagtatcagaacatcacagtgcacagacatctgatgctaccagattttgatttgctggaggacattgaaagcaaaatccaaccaggttctcaacaggctgacttcctggatgcactaatcgtgagcatggatgtgattcaacatgaaacaataggaaagaagtttgagaagaggcatattgaaatattcactgacctcagcagccgattcagcaaaagtcagctggatattataattcatagcttgaagaaatgtgacatctccctgcaattcttcttgcctttctcacttggca

SEQ ID NO: 13046 - DNA, 544 bp, Homo sapiens
ggcgcagtcccccttgaacgcacctcaggcattgaaaaggggtcggaagtgaatggagtaaacacctgacagcagcgagctgggattgagaacaaaagagcacacacaggacaatagaaaaatctgaaaaacaagtggttctcctcttctggactttgaggttataaggaggctgactaaaaacttgggtttacattaatgtcttcagatggcccgtactttggaaccactagcaaagaagatctttaaaggagttttggtagccgaacttgtaggcgtttttggagcatattttttgtttagcaagatgcacacaagccaagatttcaggcaaacaatgagcaagaaatatcccttcatcttggaagtttattacaaatccactgagaagtctggaatgtatggaatcagagagctagatcaaaaaacatggttgaacagcaaaaattaaatagtctcgctttgtcgccaggctggagtacaggggcgtgatctcggctcactgcaacctctgccttctgggttcaagcgattctcctgcctc

SEQ ID NO: 13047 - DNA, 611 bp, Homo sapiens
acagagggggctcactgcagcctctacctcccaggttcaagtgattatcctgccttagcctcctgagtagctgggattacgggcgcgtgccaccacgcccagctaattttttgtatttttagttgagacagggtttcactgtcccttaagaccatcctgttagccaagatggtcttgatctcctgacctcgtgatccgcctgcctcggcctcccagagtgctgggattacaggtgtgagccaccgtgcccagccaaagactgctcttaaagcacctttttgacagtgaacatggtctaaaaaagggaagatattgtagaagatttcacacacacacgcgtgtgtgggagacaactaaaggtattgaaggtactaattaattagatttccaaaattttctacagagagttaattatcaccaaaatgtgaatggtacatacaaaacctggcattttcttgtgataagtttacatttttaggagagtggagctttcaatctgcccttttctcctttgtttttgtagttttcaccaaagatgatcaactagaaatgttaagtggctatgcaagcaaaagcatagataggttaaaaaaaaggatcagctggctggc

SEQ ID NO: 13048 - DNA, 507 bp, Homo sapiens
ggggggacggagggttgatgtcatagcaagattgcagccttcactagattaatgaggccaggttggatcctgtttaagagaactggagacaggaagcagcgggggaatagatggggaaagaggaaagttccttatgatgcaagatgaatagtgtgtgtgtccagccccagtgctgtgacggggatgagtctgaggtggacggatgatgcaatataggagagaataaagcaggtcttcgagctagattgacagaagactgtattttttattttgttttattgaggggaggagcctgaagtgtattttatcattagtctgtcttatactgtaaataaaaatgaaagcaccagctggtaaagttttcaaataaagacataaataaggtttgatatgactcagtgtggtatgttccttctcttcctaggaaactgaaaaacagagtagcagctcagactgccagagatcgaaagaatgctcgaatgagtgagctggaacagcaagtggtag

SEQ ID NO: 13049 - DNA, 546 bp, Homo sapiens
gacagaggggggacttggcggcagaggcagtgcggatccggcgttctccactgatcttttccaaggctgtacagacatggcggcggcttttcggaaggcggctaagtcccggcagcgggaacacagagagcgaagccagcctggctttcgaaaacatctgggcctgctggagaaaaagaaagattataaacttcgtgcagatgactaccgtaaaaaacaagaatacctcaaagctcttcggaagaaggctcttgaaaaaaatccagatgaattctactacaaaatgactcgggttaaactccaggatggagtacatattattaaggagactaaggaagaagtaaccccagaacaactaaagctgatgagaactcaggacgtcaaatatatagaaatgaagagggttgcagaagctaagaaaatcgaaagactaaaatcagagctccatctgctggatttccagtggaagcaacagaacaagcatgtgttcttttttgacaccaaaaggaagttgaacagtttgatgtcgcaactcacctgcaaaca

SEQ ID NO: 13050 - DNA, 346 bp, Homo sapiens
gtggagaaggtggaaaaggtggtgatgtctgggttgtagcccaaaacagaatgactttaaaacaacttaaagacaggtatcctcggaaacggtttgtggctggagtaggagcaaacagcaaaattagtgcactgaaaggctccaaaggaaaagactgggaaatccctgtgcctgtgggtatttcagtaactgatgaaaatggtaaaattataggagaactcagtaaagaaaatgacagaattttggtagctcaaggaggtcttggtggtaaattacttacaaatttcttaccattgaaaggccagaaacgaataattcaccttgatctaaaacttatagctgatgt

SEQ ID NO: 13051 - DNA, 638 bp, Homo sapiens
acagaagggatatgcaacttgcctcatatttctgttgaacggtattagacttgacttgcgatcttgacaaaggcagggacttctctttcctgtttgccagtacacccagtgcctagtgtggtgtctgacacatagtagctgcctaatatacatctgtgggacagataaatgactcagtttacttgtgtggtttctgttcactcataacactggtttatacctgaactttgccttaagactcctcaactaaccagcaaattctctttaatatttcttagttcaggttctagtttaatctcctcatttctttaccttaattgtgtataatcagcttttcttaaaagtaaggtggaagtttttgacagaattctattgcctgagtggtaatccttcccagcacatgaatttgtcacattagtctctcctagctttgagaatttgatctattttaagaaatgtcctggctgggctcagtggctcacacctgtcatcttagacctttgggaggccgaggtgggcggatcacctgaggtcagaagttcgagaccagcctggacaacatggtgaaaccctgcctctactaaaaatacaaaaattagctgggcatggcggcgggcacctgtaatcccagctactca

SEQ ID NO: 13052 - DNA, 490 bp, Homo sapiens
aaacccagggaccatcaaagtgggagaccctgtgtacctgctgggccagtaatgggaaccgtatgtcctggaatattagatgccttttaaaaatgttctcaaaaatgacaacacttgaagcgtggtgtttcagaactgagacctctacattttctttaaatttttgattttcacatttttcgtcttttggacttctggtgtctcaatgcttcaatgtcccagtgcaaaaagtaaagaaatatagtctcaataacttagtaggacttcagtaagtcacttaaatgacaagacaggattctgaaaactccccgtttaactgattatggaatagttctttctcctgcttctccgtttatctaccaagagcgcagacttgcatcctgtcactaccactcgttagagaaagagaagaagagaaagaggaagagtgggtgggctggaagaatatcctagaatgtgttattgcccctgttcatgaggtacgcaatga

SEQ ID NO: 13053 - DNA, 589 bp, Homo sapiens
gttggagaagttcatggtatgtagtttaatgcaaaatgaaaccattttatttcaatgttattaaaaaggtttgttttattaggaagttaatgtattgttgcagtgttttgtgcctgtttaaaggcttttgtttagcagagtgaatgtaaaatacagtaaaatgttaagattgtcatctactttttaaaaaaaaatatcaacttggaattgttttttaaaggctcaatcaaggaagtgaggtgtgcaataaggtagcaagtaaaacgcagttgcgtttttatgtcatgttagagatccatacaattttccactcacgggatttttgttgatggctgaattcttgtggattcataagaggatcatgcccttagcaagtacttttgttttgttttaaattaagagattcccaaatgcctttttccccctcatcttgaaatgagatgagttttatgtgtaagcaatatttatttaactattctataaaattattgagtgcctactgaggcctttaagcaccgctaacattcctttccatcattcttttaaatgacataaaataattgtgcaatgttcctgatgatgtacccca

SEQ ID NO: 13054 - DNA, 605 bp, Homo sapiens
acagaaggggttactttattattgtattcaaaattcattgtgtatattactacaaagacaaccccaaaccaatttttttcctgcgaagtttaatgatccacaagtgtatatatgaaattctcctccttccttgcccccctctctttcttccctctttcccctccagacattctagtttgtggagggttatttaaaaaaacaaaaaaggaagatggtcaagtttgtaaaatatttgtttgtgctttttccccctccttacctgaccccctacgagtttacaggtctgtggcaatactcttaaccataagaattgaaatggtgaagaaacaagtatacactagaggctcttaaaagtattgaaagacaatactgctgttatatagcaagacataaacagattataaacatcagagccatttgcttctcagtttacatttctgatacatgcagatagcagatgtctttaaatgaaatacatgtatattgtgtatggacttaattatgcacatgctcagatgtgtagacatcctccgtatatttacataacatatagaggtaatagataggtgatatacatgatacattctcaagagttgcttgaccga

SEQ ID NO: 13055 - DNA, 542 bp, Homo sapiens
atgtacgtgccctgctgggggccttactttatagaatgagagcatccgagcttccctaatgaatctggctagttctgtgtctggctgaggatacaggagtgggacatccactctcggatccctcagagcacagaaaccttcagctttgctgtctctgaagtatttcctccagtttccctgcgggcccctatgtttgagtttgatggctgctggatcctcactcaacgaaaactcggttggaaactgttccgcctggcagtccttttttgttgttttccatctcatttcccttccatctgaaagtggcattcagctgacttgctcatttagactgttcacggagtctgaatctgccaacgtggtgttggaggctccaccttgaaaagggccacagtcagggcaactttccccatacaggaaaacttgaaaattacatcaacagtctacgtcacagccaaattatatttcctttataccaaacaaaactatggagaactaaaagtacatcacacaaaacgtttatagtgttttgcatgtgacct

SEQ ID NO: 13056 - DNA, 617 bp, Homo sapiens
cactatagggaatttggccctcgaggccaagaattcggcacgagggggagcgaaagtcctccactcagaggcagagactgagttaagtcataggtggccttaggcatctgcattgtttgcaggggttaagttttccttccagtgagggctggagggatgaattagctggtacctgaagccccgcttagctctgacactctgccaacatcctctgattctaggtgtggtgttgactgtcctttcaaggaaaaacttgcaatagagggaaaagccattaaagcagctccctgcttcatcattaagtcctgtcatccctaccagccaatcccagtcaaagaagttatgctttattcacttctgtggaattacaagtgagagacacttttaggacctgatggacaaagcaggagattcactgtcagctttcctggtcctctccttacttctgtgggccttgcaccgtcttagtttacacatctgccaaaggggtagaattacacttctttttacaggtaaatgtcaaggcacaatcagttttcaggaagtgcttcaagaccccaggtgaaatgaaaatgctaagtaccctctgaatggccatgcctgttaccaggtgctgc

SEQ ID NO: 13057 - DNA, 503 bp, Homo sapiens
agctattatgatcattttatttttgtgattattccccacctctaagtctctcagaggataaaagcctgtctgccagtctcctccggccccagttagtcatcttcccatcttccttcagtctcacttagagtccttatgctgcaatctaggtcaccctcccccaacacacacacacacacacacacacaggtcagcagggcctcagacacagaaaaaagtttaattctgctgcggcggagggtcccggctccggtagagagggggatttggttttggattttgttcgtgtggggatttatttgggagagtctggtccttccagtgggacctgcccgggagaatgagtaaagagaagaaatcaggagagacagggagactagacaaaaccagggagggccgagggacaagagacgacaggacagagagaaaggagaggcaaatagggaaagacaggcactacagagagacgacaagagggcgggatagagacaaacgagggaaac

SEQ ID NO: 13058 - DNA, 81 bp, Homo sapiens
agagtaaaaccttttatgacaggggctgcagaacaaatcaagcacatccttgctaatttcaaaactaccagttctttattg

SEQ ID NO: 13059 - DNA, 563 bp, Homo sapiens
gacagaaggggaaatttgcctctcttgggactctccccctcccaggcattttccattcctggaaaggctcctttggggttcagaatccagagaccaaaccctgacccacctccttcctttcctccagcccacgctggtcggtccccatgccttcccagggcttcttcatgtcagatgcacccaagtccttagcccagctgtgccacctgcaggagttcgctcttgcgtttcttcccctccccaagaagggagggggctacttcaggcccttctgtgtgttgcctggcaggataccttgtccaaccagctacccacctcaactcccctgtagtttaggacacaaaacagctaccagcggtacagagcggtgatcaaagccgagtacttacaactctggtaagcctagcttctccgcctcagcccttctgcttctggaagggctatcctgggggtgaacttgaaactttcatcaggcttctgcaaaagctcttcttcctgaagacagacccagcctttgtgctctcaccctccactctggtaaagctgcacctctgggggaatga

SEQ ID NO: 13060 - DNA, 496 bp, Homo sapiens
tgtgaagattgtacactatattacatgatcagatcatacaaataatctaagattatacagtctagtgatcctagattacacaagtaatctaagcttccactttaggaaactagaaaaagaagagcaaattaaatccaaagtaacctgaaaaaacattagagtagaaatcattgaaattgaaaagagaaaatcgataaaacccaaaactggttccttgaaaaggtcagtaaaattgataaacctctagctagcttaagaacaaacagaagacaaatattgctaataccaaaaatgaaagaggccatcacagctaatcctatggtcaccaaaaggattagaaagaaacatggacaactctgtccataaatttgataacttagctaaaatggaccaattccttgcaagacgcattctctcaaagctcacacaagatagacctcaataggcatatgtatctattaaataaaccaaagcagtaattaataaccttccaagg

SEQ ID NO: 13061 - DNA, 474 bp, Homo sapiens
ttaaatagcttttttaatttgtaaattaaaatcttacaaactaaatcagtgtgctgctagagggttctttttcacttgacatgcttattagaaagctgacccaacaagagctctctgcctccggtcactcttgctgtggtgctacgtggaagtgaatggagactgatctcaaatctgaactgcagctttcgctgctgtgagttggggatatgatagtcagctcaggcttcagattgtatgagaaaaatgaagagaagtcaacaaatattttggtactcttcattcatttatctctaaaaccaggagttgaattttcctcatcttgaaagactcttggggtctgtttctggtattttacaaaattgctaagtggaatgcatgaattgcattatgttctctggtacacgtagagttcagacccttctgaactctgttgatataccacaccatgttctggaccatagctctgcatct

SEQ ID NO: 13062 - DNA, 553 bp, Homo sapiens
gagccaccaaaatggtggtgttcgggtatgaggctgggactaagccaagggattcaggtgtggtgccggtgggaactgaggaagcgcccaaggaaatgaaacacgatttccaaaatgaacttaatctttcatgagaaactgaggatagagatgtcaataagcagccactgtttccacctccccacctgaagagctaggaggacaactacaaacagcctgactgccttctcggaatgaggagagaggaaaacagcaacagtatcagttttcaagatggcagcatctatgcatggtcagcccagtccttctctagaagatgcaaaactcagaagaccaatggtcatagaaatcatagaaaaaaattttgactatcttagaaaagaaatgacacaaaatatatatcaaatggcgacatttggaacaacagctggtttctctggaatattctcaaacttcctgttcagacgctgcttcaaggttaaacatgatgctttgaagacatatgcatcattggctacacttccatttttgtctactgttgttactgacaagc

SEQ ID NO: 13063 - DNA, 534 bp, Homo sapiens
acagaagggcagaagcagaccactctgtgcaccaacctaaaaaattacagagaagagaaaattatctttggattgtgctgccctatataaaggtggcagaaagacatttttaaaaagcttattatttcttgcattattttaaaaagttcagagttgaaatgcctttcaaccatttccttctgtggtcatttttcttgctgcctttttcacccaagattcagcagtcagatgtttactgcacacctattacctattatttgctgttcttgcatggttcaaaccaccattctgtagccacccatcctttgccttatctaacaaacatttttccaggaaggtggaaaaggaagtgttgctctcattgtgtgactcagtgctgctgtccatcccatggaaacatgggcacaatcaagtatttgtccagcctattgcaggcttttcctgactttaaaataaattgtgatcaataatagtacctttgattatacatttattattgtgtctctctctgatgtactgtggattgtacattta

SEQ ID NO: 13064 - DNA, 519 bp, Homo sapiens
gacagaagggctttttctctgcacggagccggcgcttttgcagttgcttctgcggaaaggtggtagttaagaatttgtaaaggccagagaactacctacgattctctcagcggtctctcttctcctcaagtttgaaatgctttatctcatcgggttgggcctgggagatgccaaggacatcacagtcaagggcctggaagttgttagacgctgcagtcgagtgtatctggaagcctacacctcagtcctaactgtagggaaggaagccttggaagagttttatggaagaaaattggttgttgctgatagagaagaagtggaacaagaagcagataatattttaaaggatgctgatatcagtgatgttgcattccttgtggttggtgatccatttggggccacaacacacagtgatcttgttctaagagcaacaaagctgggaattccttatagagttattcacaatgcctccataatgaatgctgtaggctgctgtggtttacagttatataagtttgg

SEQ ID NO: 13065 - DNA, 577 bp, Homo sapiens
gcatgaactgaatgttccatttttcaaagttggatctggagacactaataattttccttatctggaaaagacagccaaaaaaggtcgcccaatggtgatctccagtgggatgcagtcaatggacaccatgaagcaagtttatcagatcgtgaagcccctcaaccccaacttctgcttcttgcagtgtaccagcgcatacccgctccagcctgaggacgtcaacctgcgggtcatctcggaatatcagaagctctttcctgacattcccatagggtattctgggcatgaaacaggcatagcgatatctgtggccgcagtggctctgggggccaaggtgttggaacgtcacataactttggacaagacctggaaggggagtgaccactcggcctcgctggagcctggagaactggccgagctggtgcggtcagtgcgtcttgtggagcgtgccctgggctccccaaccaagcagctgctgccctgtgagatggcctgcaatgagaagctgggcaagtctgtggtggccaaagtgaaaattccggaaggcaccattctaacaatggacatgctcaccgtg

SEQ ID NO: 13066 - DNA, 569 bp, Homo sapiens
ggaagttggtgtttcgctgggccctggtactgaagacgcggtccgggtcgcccctagctgtttcctactcacccaaagccccgcacccgccttttctctctctcctctggcaggatgaggcgtgcaggcctgggtgaaggagtacctcctggcaactatgggaactatggctatgctaatagtgggtatagtgcctgtgaagaagaaaatgagaggctcactgaaagtctgagaagcaaagtaactgctataaaatctctttccattgaaataggccatgaagttaaaacccagaataaattattagctgaaatggattcacaatttgattccacaactggatttctaggtaaaactatgggcaaactgaagattttatccagagggagccaaacaaagctgctgtgctatatgatgctgttttctttatttgtcttttttatcatttattggattattaaactgaggtgatgcatgtaattgtgaatttggaatttgttccaacttaatggcttgcagtaccactttgataaaaatcagcatcaaaacattcccagtgttcaaatact

SEQ ID NO: 13067 - DNA, 365 bp, Homo sapiens
tacggctgcgagaagacgacagaagggtacggctgcgagaagacgacagaagggtacggctgcgagaagacgacagaagggtacggctgcgagaagacgacagatgggtacggctgcgagaagacgacagaagggtacggctgcgagaagacgacagaagggtacggctgcgataagacgacagaagggtacggctgcgagaagacgacagaagggtacggctgcgagaagacgacagaagggtacggctgcgagaagacgacagaagggtacggctgcgagaagacgacagaagggtacggctgccagaagacgacagaagggtactgctgcgagaagacgacagaagggggtggctcacgcct

SEQ ID NO: 13068 - DNA, 164 bp, Homo sapiens
ttaaataacagtgcaatttcaaaaaaatttataactttcttttgatcatcatgtacagaggtgttttttttctttaggcttctcatgcatatgaatattttaagcacgaatggactactaaatatctgagtttttttttttttttttttaaagatcctaacaaa

SEQ ID NO: 13069 - DNA, 583 bp, Homo sapiens
gacagagggggcagacgaggtcatgaatcatgtgacggtggcttgaggaggaacctgtctttaaagctgtccctgaagtgacagcggagagaaccaggcagcccagaaaccccaggcgtggagattgatcctgcgagagaagggggttcatcatggcggatgacctaaagcgattcttgtataaaaagttaccaagtgctgaagggctccatgccattgttgtgtcagatagagatggagtacctgttattaaagtggcaaatgacaatgctccagagcatgctttgcgacctggtttcttatccacttttgcccttgcaacagaccaaggaagcaaacttggactttccaaaaataaaagtatcatctgttactataacacctaccaggtggttcaatttaatcgtttacctttggtggtgagtttcatagccagcagcagtgccaatacaggactaattgtcagcctagaaaaggaacttgctccattgtttgaagaactgagacaagttgtggaagtttcttaatctgacagtggtttcagtgtgtaccttatcttcattataacaacacaatatcaatc

SEQ ID NO: 13070 - DNA, 386 bp, Homo sapiens
acagaaggggtgatcaccttactctgctgctgcttctacttgtcacatctgagactgtttcttaaaatagagctccccagcagcaatttttcattatatggcctcatcgtgcatgtatttggtatgaactctgataagagattatgatgttgatatcataagaatttccctcttttacagaacatgaaaaaatgcatgcatttaggttaagcattgactatatattggaaatgtagttaaaaaaaactgtacaggtccagcacggtggctcacgcctatagtccctgcactttgggaggccagggcaggtgggtcacttgagatcaggagttagagaccagactggccaacatggtaaaaacaaatctctactaacaaaaaatacc

SEQ ID NO: 13071 - DNA, 101 bp, Homo sapiens
ggaaagagctgaggttcttacccttgttgcatgctgccacctctccttagccagtgctcttgtacatccacacagcaccctaaggagccatagtcaccatc

SEQ ID NO: 13072 - DNA, 615 bp, Homo sapiens
gggtccagggcttccatgctgctccccaagagtgaagccaaactacttgaagggtctttctcatgtacttaacaggctgcccaagcctgtactcttgccagagctgcccacgcttctttccttgctgctggaggccctgtcctgccctgactgtgtggtgcagctctccaccctcagctgccttcagcctcttctactggaagcaccccaagtcatgagtcttcacgtggacaccctcgtcaccaagtttctgaacctcagctctagcccttccatgtctgtccggatcgccgcactgcagtgcatgcatgctctcactcgcctgcccacccctgtgctgctgccgtacaaaccacaggtgattcgggccttagccaaacccctggatgacaagaagagactggtgcgcaaggaagcagtgtcagccagaggggagtggtttctgttggggagccctggcagctgagccctcagtcctggcctagactgttctgacaatctaacctgggattactaactgttgagccatcttccccaaagcagggaaaccactggtctctgactgcctttcccacagacacagcacaaatgctaggcctctgttgcatggctgta

SEQ ID NO: 13073 - DNA, 489 bp, Homo sapiens
gctcttccggagcctgcagcatggggcccctgccgcgcaccgtggagctcttctatgacgtgctgtccccctactcctggctgggcttcgagattctgtgccggtatcagaatatctggaacatcaacctgcagttgcggcccagcctcataacagggatcatgaaagacagtggaaacaagcctccaggtctgcttccccgcaaaggactatacatggcaaatgacttaaagctcctgagacaccatctccagattcccatccacttccccaaggatttcttgtctgtgatgcttgaaaaaggaagtttgtctgccatgcgtttcctcaccgccgtgaacttggagcatccagagatgctggagaaagcgtcccgggagctgtggatgcgcgtctggtcaaggaatgaagacatcaccgagccgcagagcatcctggcggctgcagagaaggctggtatgtctgcagaacaagcccagggacttctgg

SEQ ID NO: 13074 - DNA, 507 bp, Homo sapiens
gatcgtggtggatggggtatttcaccacgtggtgctggctacacatttggacaagacatttctgaaacctttaaccatgccaatggtctcacactggtttctcgtgcccaccagcttgtaatggagggatacaattggtgtcatgatcggaatgtggttaccattttcagtgcacccaattactgttatcgttgtgggaaccaggctgctatcatggaattagatgacactttaaaatattccttccttcaatttgacccagcgcctcgtcgtggtgagcctcatgttacacggcgcaccccagactacttcctataaatttctcctgggaaacctgcctttgtatgtggaagtatacctggctttttaaaatatatgtatttaaaaacaaaaagcaacagtaatctatgtgtttctgtaacaaattgggatctgtcttggcattaaaccacatcatggaccaaatgtgccatactaatgatgagcatttagcacaatttgagactg

SEQ ID NO: 13075 - DNA, 453 bp, Homo sapiens
acatctttaaacaactttgattttacttttgtatttggtgatagatactagtctgttttcattcttctgcatatggatatccagttttttcaataccatttcccaccagtgtatgttcttggcacctttgtcaaaaatgagttttctgtggggacatttgtacatttgttacttttctctattctgttccattgatctatgagtctatttttatgccagtaccatactcttttggttgctataattctgtggtataatatgaagtcagaaaatataattcctccagttttatttatttatttatttttgcttaggatagtattatttcttatagtgaaagcattctatgttatttattattagtctaattttgtagttttacaatgctatcctcttttacaaagctatgatcaactcagtgtgtccagatcaggatcatttgtagctatttgc

SEQ ID NO: 13076 - DNA, 285 bp, Homo sapiens
aacaatattggtcttccaggtgttactcatttcaattatgtgtagtataccaggacagacctattttcatgtcttatttctttaaagagctgcttcattggccgggcgccatggctcacgtctgtaatcccagcactttgggaggccgaggcgggtgggttacttgaggtcaggagttcgagaccagcctggcaaacatggcgaaaccccatcttaactaaaaatacaaaaaaattagccgggtgtggtgtcacgcgcctgtaatcccagctacttggggggctc

SEQ ID NO: 13077 - DNA, 372 bp, Homo sapiens
caaccggtacacatttaatgaggtgagggggagcttccggagtggtttgtgcaagaagaaaagcagcaccggatacgacagttgcctgttggtaagaaggaggtggagcattaccggaaacgctggcgggaaatcaatgcacgtcccatcaagaaggtggctgaggctaaggctagaaagaaaaggaggatgctgaagaggctggagcagaccaggaagaaggcagaagccgtggtgaacacagtggacatctcagaacgagagaaagtggcacagctgcgaagtctctacaagaaggctgggcttggcaaggagaaacgccatgtcacctacgttgtagccaaaaaaggtgtgggccgcaaagtgcgccgg

SEQ ID NO: 13078 - DNA, 87 bp, Homo sapiens
gactacattttgctctgtgaactatcccctgcgctttgaacgtgccagcagcccttgtttatatgcccattcttttcacttcctctc

SEQ ID NO: 13079 - DNA, 60 bp, Homo sapiens
gtagcagcccacggagatcctaagctggctgtcttgtgtgcagcctgagtggggtggtgc

SEQ ID NO: 13080 - DNA, 613 bp, Homo sapiens
acagaaggggggctttgcgaagatggcggcgctgggggtgctggagtccgacctgccaagtgccgtgacacttctgaaaaatctccaggagcaagtgatggctgtaactgcacaagtgaaatcactgacacaaaaagttcaagctggtgcctatcctacagaaaagggtctcagcttcttggaagtgaaagaccagctgctgctcatgtaccttatggatttgacccacctcattctggacaaagcctcaggaggatctcttcagggacatgatgcagttttgagactggtggagattcgcacggttttggaaaagcttcgtcccttggaccaaaagctgaagtatcaaattgacaagctgatcaagactgcagtgacaggcagccttagtgagaatgacccacttcgttttaagcctcatcccagcaatatgatgagcaagttgagctctgaggatgaggaggaagatgaagcagaagatgaccagtctgaggcttcagggaagaaatctgtgaagggagtgtctaagaaatatgttcctccacgcttggttccagtacattatgatgaaacagaagctgagcgggagaagaagcgtctagaacgagccaag

SEQ ID NO: 13081 - DNA, 531 bp, Homo sapiens
gctgaaagtcccaagtgtcatgaaggaaatgggacatttgagtgtggcgcgtgcaggtgcaatgaagggcgtgttggtagacattgtgaatgcagcacagatgaagttaacagtgaagacatggatgcttactgcaggaaagaaaacagttcagaaatctgcagtaacaatggagagtgcgtctgcggacagtgtgtttgtaggaagagggataatacaaatgaaatttattctggcaaattctgcgagtgtgataatttcaactgtgatagatccaatggcttaatttgtggaggaaatggtgtttgcaagtgtcgtgtgtgtgagtgcaaccccaactacactggcagtgcatgtgactgttctttggatactagtacttgtgaagccagcaacggacagatctgcaatggccggggcatctgcgagtgtggtgtctgtaagtgtacagatccgaagtttaagggcaaacgtgtgagatgtgtcagacctgccttggtgtctgtgctgagcataaagaatgtgttcagt

SEQ ID NO: 13082 - DNA, 122 bp, Homo sapiens
gctgcgagaaggacgacagaaggggttaatagaaagttggccaatttcaccccattttctgtggtttgggctccacattgcaatgttcaatgccacgtgctgctgacaccgaccggagtact

SEQ ID NO: 13083 - DNA, 450 bp, Homo sapiens
tgcaggaactgcttgcctaataacaaggaacagcggctggatttattggttttggaacatctcagagtgacctaggctatgttcctgctattcaaggagctgaatatattgacagtcttgtaaattctgatttccgaatggagctgcggaaactttcatagaaagatgtcaccacaaaattaacagctatgcaggaatttggaaccatgtgtacagagagagacacaggactgagaaaggagttcttacatattggccaagaatattgtgcttaatttcacttgatcatgaccgtcgcgttcgagaagccactcaacaagcttttgagaaacttatccttaaagtaaagaagcagttggctccctacttacaaagtttagtgggatattggctaatggctcagtgtgatacttacacaccagctgcgtttgcagcaaaagatgcatttga

SEQ ID NO: 13084 - DNA, 588 bp, Homo sapiens
aactacagtgtaaacatatcccagatgaaaactgctgtatggaaaaatgacagaaagtaactgattgacactgttgattcacagttcaacctcctatctgggaaagacatttctttcctctgctcactttaagaacttttaccgactccaaaaatctcaggaattaaacttttaacagttacagcaataaagaatagttagtactccaaaaatattatatttaagatgctcaacaagaaaaaaatgcaaatgtaatatttttttcaaattacttctttattgacttgtccaaatttcaaaagtgcctacccttcaataaaacttttttattctgatctccataaattacttagtcttctatgtatagctatcaaggaaataaaaccaattttgccacagccacaactgtaaatgtttttgtacccatgctgaaactcataacaacacagacataaaaatagctgtgaggttttgctttttttgttgtcagctatcttaagaatcattaaatacacctgctttgggtaaaactctttgcaagcagtaattaacactagtaacagtgaaagcacaagatttccaaatcag

SEQ ID NO: 13085 - DNA, 313 bp, Homo sapiens
gaagggcaagcagagccaaaagcaagtactatgcaagtgaaaactactttctaatcaagattttacaaatatatttcttttttttttgaaacggagtctcgctttgtcccccaggctaaattgcagtggtgccatctcggctcactgcaacctccaccccccaggttcaagcaattctgtctcaccctcctgagtagctgggattacagtgcccgccactacgcctggctaatttttttgtatttttagtaaagacgggtttcaccatttgagccaaactggtcttgaactcctgaccttgtgatctgcccgc

SEQ ID NO: 13086 - DNA, 83 bp, Homo sapiens
ggcatggcatcctgctcgtgtagccttctctgtggcacgcgctgggcagaaaggctaccatcaccgcactgagatcaacaaga

SEQ ID NO: 13087 - DNA, 507 bp, Homo sapiens
acagaagggggtgtcagctccgcagggtttggggaaacggccgctgagtgaggcgtcggctgtgtttctcaccgcggtcttttcctcccactcttggctggttggaccccgctatggaaaagttggcccctgagccagagctccagcagccttgttagggcgtggcctgaggcttggataagtgggatgtaaaacgaagatcaggagcagatttgaagaattacaaagtgaattggtgccagtcagcatgtcagagacagaccacatagcctctacttcctctgataaaaatgttgggaaaacacctgaattaaaggaagactcatgcaacttgttttctggcaatgaaagcagcaaattagaaaatgagtccaaactattgtcattaaacactgataaaactttatgtcaacctaatgagcataataatcgaattgaagcccaggaaaattatattccagatcatggtggaggtgaggattcttgtgccaaaacagacacaggctc

SEQ ID NO: 13088 - DNA, 372 bp, Homo sapiens
ttttgcccttggggttaaagggattttcctgcctaaccctcccaagaagttggaataacaggcccctgccaccaccccgggttaatttttattttttaagtgaaaacagggtttcaccttgtgggccaggttgatttaaaactcctgacctaagggaattcccccccctaaccctcccaaagggcggggattacaggcttaaccccccgggccggacctattaaaaaatttttttaaagtccagtcctaataaactagggactacctaaaaaccacccttttaaatattatttttttaaacaaaaataaaaaatactgtttatataaaaattaaccttaaatacccgtataggaaaaaatttttttgcccat

SEQ ID NO: 13089 - DNA, 654 bp, Homo sapiens
tcggcacgaggccgtgaccctgcgcgggccttcgccctggggcttccgcctggtgggcggccgggacttcagcgcgcccctcaccatctcacgggtccatgctggcagcaaggctgcattggctgccctgtgcccaggagacctgatccaggccatcaatggtgagagcacagagctcatgacacacctggaggcacagaaccgcatcaagggctgccacgatcacctcacactgtctgtgagcaggcctgagggcaggagctggcccagtgcccctgatgacagcaaggctcaggcacacaggatccacatcgatcctgagatccaggacggcagcccaacaaccagcaggcggccctcaggcaccgggactgggccagaagatggcagaccaagcctgggatctccatatggacaaccccctcgctttccagtccctcacaatggcagcagcgaggccaccctgccagcccagatgagcaccctgcatgtgtctccaccccccagcgctgacccagccagaggcctcccgcggagccgggactgcagagtcgacctgggctccgaggtgtacaggatgctgcgggagccagccgagcccgtggccgcggagcccaagcagtcaggctccttccgctacttgcagggcatgct

SEQ ID NO: 13090 - DNA, 644 bp, Homo sapiens
cggcggtcatggaacgccaagaggagtctctgtccgcgcggccggccctggagaccgaggggctgcgcttcctgcacaccacggtgggctccctgctggccacctatggctggtacatcgtcttcagctgcatccttctctacgtggtctttcagaagctttccgcccggctaagagccttgaggcagaggcagctggaccgagctgcggctgctgtggaacctgatgttgttgttaaacgacaagaagctttagcagctgctcgactgaaaatgcaagaagaactaaatgcgcaagttgaaaagcataaggaaaaactgaaacaacttgaagaagaaaaaaggagacagaagattgaaatgtgggacagcatgcaagaaggaaaaagttacaaaggaaatgcaaagaagccccaggaggaagacagtcctgggccttccacttcatctgtcctgaaacggaaatcggacagaaagcctttgcggggaggaggttataacccgttgtctggtgaaggaggcggagcttgctcctggagacctggacgcagaggcccgtcatctggcggatgaggctaagaatcttgttagtgtcacttttgacattagcaagatgaacccttaaccctcgattcaattgcctta

SEQ ID NO: 13091 - DNA, 381 bp, Homo sapiens
gcggccgcgcccgtgcacgagcagtccctggggtctgtagtggcctctggagagcccttctccccaggccaggcgggaaggcccccgctccggcctggttgaagtaggggaacgggtcccaacgcggggccgactcccttgaccctctgacttgctggcttcccttgttttacagtcctcggcctggcggaagttttgcaggttgtgaagacccctagtctttcattctctccttgtcacagccttgtagggcgtgaaggggtcattgccccatttagggatgcgcacctcctgatttcccgtccactgctctgcgccctgaagtggctgaaaagtgctcttaaaaggatgggaatcccgtcgccctcagctggtgcgctc

SEQ ID NO: 13092 - DNA, 618 bp, Homo sapiens
  misc_feature 611: n = A,T,C or G
tttgatcatttgctccagatgctgtgtaaccttggcaaggaacgctttctggagctggcacctgactttgtgggtgacattctctgggaacatctggagcaaatgatcaaagaaaaccaagaaaagacagaagatcaatatgaagaaaattcacacctcacctccgttcctcattggattaacagcaatacattaggttttggcacagagcaggcgccctatggaatgcagacacagaattaccccaaaggcggcctcctggacagcatgtgtccggcctccacacccagcgtactcagctctgagcaggagtttcagatgttccccaagtctcggctcagctccgtcagcgtcacctactgctctgtcagtcaggacttcccaggcagcaacttgaatttgctcaccaacaattctgggactcccaaagaccacgactcccctgagaacggtgcggacagcttcgagagctcagactccctcctccagtcctggaacagccagtcgtccttggctgatgtgcaacgggttccttccttcgagagcttcgaagatgactgcagccagtctctctgcctcaataagccaaccatgtctttcaaggatacatncaagaga

SEQ ID NO: 13093 - DNA, 515 bp, Homo sapiens
gacagaggggtcccagatccctcaggacttgccctatgagacactgatcagcagagcaggagacctttttgttcagtttcccccatccgaacttgctcgggaggccgctgcccaacagcaagctgagaggacggcagcctctactttcaaagactttgagctggcatcagcccagcagaggcctgatatggtgctgcggcagcggtttcggggacttctgcggcctgaagatcgaacaaaagatgtcctgaccaagccaaggaccaaccgctttgtgaaattggcagtgatggggctgacagtggcacttggagcggctgcactggctgtggtgaaaagtgccctggaatgggcccctaagtttcagctgcagctgtttccctgaaagccagagaagaccttcctcttacatcacattaaggcacccactcactaccttggcgtcgttttttgggtctgacttgtctcgtcaactgctggtctctcccacctggttggaaatgtcgttggaaact

SEQ ID NO: 13094 - DNA, 334 bp, Homo sapiens
ctctcttagcacaggaaggtggaaacaaaatgccaggcctctgctctgaagagcaaaactgctgtcgctgcagtatctgataccagacatccacatatccacaagaagtgcctcttaggtctgtgacagagagtgtgtctccattcctcagttcccagaaaggggagaggtttggcctaaaaagcatgtagatgggggagaaatgggtggggggagaggaacagccattaacacagtatcatgtttaacaagtatagccttgatttcagtagatgtaatggaagccaaattaaattgatacagaacccatttctcagagtcttttttttttttg

SEQ ID NO: 13095 - DNA, 444 bp, Homo sapiens
tcctttcgccgtttccgaaccgagggattgctactcgcctttggcttggcggtctctgtgctcgggggtccgaaaactgctggaaggcccccggtctctggaggggagcaggcggtagcgagtttagtgacgtggagcaggcgcagaacagtcggagatttgaagagatttcctgggtgtggagtgtgactttccaaaaccagcttttccttgagctgtatttgttgcagcaatgtttaggagattgacttttgcacaactgctttttgccactgtccttggaattgctggaggagtatatatttttcaaccagtatttgaacagtatgccaaagatcagaaggaattaaaagaaaagatgcagttggtacaagaatcagaagagaagaaaagttaatactacatggagttaggcctggcgcagtggctcacgcctgtaatccc

SEQ ID NO: 13096 - DNA, 547 bp, Homo sapiens
ggcgcatgctccgggtgtcccggagttgtcctgcgccggtgttcccacgtgcggcctgaacctgagcgcataatgttatgaggagatgggagcactagtgattcgcggtatcaggaatttcaacctagagaaccgagcggaacgggaaatcagcaagatgaagccctctgtcgctcccagacacccctctaccaacagcctcctgcgagagcagattagtctctatccagaagttaaaggagagattgcccgtaaagatgaaaagctgctgtcgtttctaaaagatgtgtatgttgattccaaagatcctgtgtcttccttgcaggtaaaagctgctgaaacatgtcaagagccgaaggaattcagattgccgaaagaccatcattttgatatgataaatattaagagcattcccaaaggcaaaatttccattgtagaagcattgacacttctcaataatcataagcttttcccagaaacctggactgctgagaaaataatgcaagaataccagctagaacagaaagatgtgaattctcttcttaat

SEQ ID NO: 13097 - DNA, 420 bp, Homo sapiens
attatcaatatggtgcttgaatatattcctataactgtagaacagtgtggaaagtgatggtaactttgaagttgttcatgttttattggctttgttttaattgacactagtagagttttaatggtctttgtgtaaattttaatggcttttccattgtttttgcttctcttaaaaagtttaagaagaatatgacctcattaaatgtgctgttttatttggaccagtcacacaaaatgtctctctagagttgactttaaagttgtttacagaaatttaaactcaattccagagattgaagttgtccaaacagctcatgggcttagtgtccaaacccctgcccagccttccctttccaagttggtgccacctccaggtagccattggtggttttcctattactgatgtggctgtggaatgata

SEQ ID NO: 13098 - DNA, 95 bp, Homo sapiens
agttgtggcagctggtaagctgtttgactaggcatgaattatttttagaacaaatgtgtttcagtcagtaactctatatgcctttctatgaaatg

SEQ ID NO: 13099 - DNA, 565 bp, Homo sapiens
gtctgggacttatgggataacatttatactccttcacatggcatgtggagtttttcttcatctcgttgtaatctgattctccagtctcatcccttcttctccccgactttacgttgcatcaatagaagctacttgtagtttcctgatgttatactactatgtgcaacatctctgacatagaccttgtttgtatctgttggtgtggacttccaactttatctagtaaaagtagtcattaaaactaagtgtagttgcatttacttcctgcaaagtttttttttcagactctttgatagaattaaccctttctctcttttttaatacttctgggttctcatatgtgatgttctaatacttcctccaattgatttctactctttctctggacacttttttttgtttttgtgaaatatatcttagtcatatttatctcacatttgtgaaacttcaaaaaaaagctttcattagacagttgaaactatggattattttcatcatttattctagcaactgatgcatttcaaaatgttttgaataggactttataaaactaaaatttattact

SEQ ID NO: 13100 - DNA, 551 bp, Homo sapiens; identical to SEQ ID NO: 2223

SEQ ID NO: 13101 - DNA, 280 bp, Homo sapiens
aacttcatatataatcaataaaacaaaagaagtgaaaagaggagattgcagccaagaggaattcgttacaaacatgtatgagattttttaagttttttttgtttttaattattcctatttcacgttcacatggaaaagtcagaaagcataactactctaggccgggcgccgtggcacacgcctgtaatcccagcactctgggaggccaaggcaagtggatggcttgagtccaggagttttgataccagcctggggaatatagtgaaaccccgtctgtcct

SEQ ID NO: 13102 - DNA, 599 bp, Homo sapiens
gggcagattgcattcacaggaactacttttattggctatgtaggattatggactggccagagcccacacaagtttacagtttctggtgatgaacgagataaaggctggtggtgggagaatgctatcgctgccctgtttcggagacacattcccgtcagctggctgatccgcgctaccctgagtgagtcggaaaacttcgaagcagctgttggcaagttggccaagactccccttattgctgatgtttattacattgttggtggcacgtccccccgggagggggtggtcatcacgaggaacagagatggcccagcagacatttggcctctagatcctttgaatggagcgtggttccgagttgagacaaattacgaccactggaagccagcacccaaggaagatgaccggagaacatctgccatcaaggcccttaatgctacaggacaagcaaacctcagcctggaggcacttttccagtgaaagcaggccaggtgcggtggctcacgcctgtaatcccagccctttgggaggccaaggcgggtggaacacttgaggtcgggagttcaagaccagcctggccgacatggtgaaacctcgtc

SEQ ID NO: 13103 - DNA, 570 bp, Homo sapiens
ggcaaacgcggtgggggctgctcggcggtcaggagcagcaagagacagagcgacatgagagattggaccgcgggctgcactggagaatttactggtaggataattcatccctaaagagattgaagtgagcttcagaatggcaaaagaggagccccagagtatctcaagggacttgcaggaactgcagaagaagctgtctctgctgatagactccttccagaataactcaaaggtggtggcctttatgaagtctccagtgggtcagtacttggacagccatccgtttctggccttcaccttgctggtgttcattgtcatgtcggccgttcctgttggattcttcctgctcatcgtggtgcttaccaccctggctgctctgctgggggtcataatattggaaggattggtcatctctgtgggtggcttctcactgctctgcatcctctgtggtttgagcttcgtatcactcgccatgtcggggatgatgatagcatcttatgtagtggtctccagcctcatcagctgctggttttctcccaggccactgacacagcaaaacaccagttgtga

SEQ ID NO: 13104 - DNA, 579 bp, Homo sapiens
  misc_feature 79: n = A,T,C or G
gacagaaggggattttggtgcagagcggctaaagattccagaaggattatttgacccttccaatgtaaaggggttatcnaggaaacacaatgttaggagtcagtcatgttgtcaccacaagtgttgggatgtgtgatattgatatcagaccaggtctctatggcagtgtaatagtggcaggaggaaacacactaatacagagttttactgacaggttgaatagagagctgtctcagaaaactcctccaagtatgcggttgaaattgattgcaaataatacaacagtggaacggaggtttagctcatggattggcggctccattctagcctctttgggtacctttcaacagatgtggatttccaagcaagaatatgaagaaggagggaagcagtgtgtagaaagaaaatgcccttgagaaagagttcccaagcttctaccttccttttgtcaccttacgtttcatagctttagtatactcaggaaaagaatgaccatcttttgtagaatgtttatacatttttgcatatttcaatttccacttaaattttttaaagctttaactggctctataaattaag

SEQ ID NO: 13105 - DNA, 456 bp, Homo sapiens
atccaagagggcaaaagccatcagaaccagcatgaggctcactttgtggtagagctgtgcaagtacttcctgtgccaggaatacctgccttcccagatcaccatcctcactacctataccgggcagctcttctgcctgcgcaaactgatgcctgccaagacatttgctggcgtcagggtccatgttgtggacaaataccaaggggaagagaatgacatcatcctcctctcgctagtgcggagcaaccaagaaggcaaggctgggcgcagtggcttacgcctgtaatcccagcactttgggaggccgaggcaggcggatcacgaggtcaggagttcgagaccagcctgaccaacatggcgaaaccccgtctctactaaaaatacaaaaattagctgggcgttatggcgggcgcctgtaatcccagctacttgggaggctgaggcagaagaatcgctt

SEQ ID NO: 13106 - DNA, 557 bp, Homo sapiens
acagaaggggaattacgagcaacccaccaaagaggcattgaccacagtaacattggcaacaagatgctgcaggccatgggctggcgggaaggctctggcttgggacgaaagtgtcaaggcattacggctcccattgaggctcaagttcggctaaagggagctggcctaggagccaaaggcagcgcatatggtttgtcgggcgccgattcctacaaagatgctgtccggaaagccatgtttgcccggttcactgagatggagtgagagagagagagagagagagatgacaaggagcacaagaagtggtccatctcccgaattcgctgttaccgcctgtctctttaagggcatgccttgtgctgttaatagatcttagggtgaaccacttcattctgcagggttctccctcccaccttaaagaagttccccttatgtgggttgcctggtgaatggccttccttcccgccagagggcttgtgaacagaccggagaggacagtggattgtttatactccagtgtacatagtgtaatgtagcgtgttacatgtgtagcctat

SEQ ID NO: 13107 - DNA, 606 bp, Homo sapiens
gtcccaaatcattgcaaagacatgaaaaaactcacactggagagaaactctatgaatgcaagcaatgtggtgaagccttcagtagtcccagttcctttcgataccatgaaaggactcacactggagagaaaccctataaatgcaagcaatgtgggaaagccttcagagctgcctcagtccttcgaatgcatggtaggactcaccctgaagataaaccctatgagtgtaagcaatgagggaaagccttcagatctgcctcacacctttgaatgcatggtaggacacacaatcaagagaaaccatgaatgtaaagaatgtgggaaacccttcaggtctgcccagaaccttcgaattcagtaaaggacacaagcacacataagaatgcattctggatagctgaacaaaaggcagcagaaacttctgcagacttaaatgtccctgtctgacagctttgaagagagtagcagtcctcccagcatggagtttgagatctaagaatggacagtctgcctcctcaagtgggtccctgatctccaagtagcctaactgggaagcacttcccagtaggggccaactgacacctcatacggccgtgtgcccctctgt

SEQ ID NO: 13108 - DNA, 86 bp, Homo sapiens
gagcacaaggccgagatcatcactgtcagcgatggccgaggcgtcaagttcttctagcagggacctgtctccctttacttcttacc

SEQ ID NO: 13109 - DNA, 501 bp, Homo sapiens
acgacagaagggtacggctgcgagaagacgacagaagggtacggctgcgagaagacgacagaagggtacggctgcgagaagacgacagaagggtacggctgcgagaagacgacagaagggtacggctgcgagaagacgacagaagggtacggctgcgagaagacgacagaagggtacggctgcgagaagacgacagaagggggtctcatgggtctatacgtatgtcaaagcttatctaattgtatactttaaatatgtgcagttcattgccagccaattatactcaatctgtttttaaaagtaaaatgtgcttcttataagtaacaattttttaaaatgtagtctgatgacctttgtcttttaattagagaatttaatctgtttacatttaataactgatataggcagggcacggtggctcccgcctgtaatcccagcactttgggaggccgaggcgggtggatcacctgacgtcgggagttgaagaccggcctggccaac

SEQ ID NO: 13110 - DNA, 627 bp, Homo sapiens
acagaagggccgactgcggggcagtgaagcactgcctgcagaccgtttggaacaagccaacagtgaaatcccttccctgcgacatatgcaaagacgttgtcaccgcagctggtgatatgctgaaggacaatgccactgaggaggagatccttgtttacttggagaagacctgtgactggcttccgaaaccgaacatgtctgcttcatgcaaggagatagtggactcctacctccctgtcatcctggacatcattaaaggagaaatgagccgtcctggggaggtgtgctctgctctcaacctctgcgagtctctccagaagcacctagcagagctgaatcaccagaagcagctggagtccaataagatcccagagctggacatgactgaggtggtggcccccttcatggccaacatccctctcctcctctaccctcaggacggcccccgcagcaagccccagccaaaggataatggggacgtttgccaggactgcattcagatggtgactgacatccagactgctgtacggaccaactccacctttgtccaggccttggtggaacatgtcaaggaggagtgtgaccgcctgggccctggcatggccgacatatgcaagaactatatca

SEQ ID NO: 13111 - DNA, 452 bp, Homo sapiens; identical to SEQ ID NO: 2244

SEQ ID NO: 13112 - DNA, 51 bp, Homo sapiens
atatgatgaagggtctaatctcaaaaaacagaccaataagaaccgggtgca

SEQ ID NO: 13113 - DNA, 580 bp, Homo sapiens
gcggccgcaggtctgcgaggcgctgctcttcgccctgttgctccagaccggcgtgtgctatggcatcaagtggctggcgctgtccaagacaccatcggccctggcactgaaccagacgcaacactgcaagcagctggagggtctggtgtctgcacaggtgcagctgtgccgcagcaacctggagctcatgcacacggtggtgcacgccgcccgcgaggtcatgaaggcctgtcgccgggcctttgccgacatgcgctggaactgctcctccattgagctcgcccccaactatttgcttgacctggagagagggacccgggagtcggccttcgtgtatgcgctgtcggccgccgccatcagccacgccatcgcccgggcctgcacctccggcgacctgcccggctgctcctgcggccccgtcccaggtgagccacccgggcccgggaaccgctggggaggatgtgcggacaacctcagctacgggctcctcatgggggccaagttttccgatgctcctatgaaggtgaaaaaaacaggatcccaagccaataaactgatgcgtctacacaacagtgaagtg

SEQ ID NO: 13114 - DNA, 500 bp, Homo sapiens
cgggatgattggaatagcttctggaatttgttcaagttttgggtatgtttaatctgttatgtactagtgttctgtttgttattgttttgttaattacaccataatgctaatttaaagagactccaaatctcaatgaagccagctcacagtgctgtgtgccccggtcacctagcaagctgccgaaccaaaagaatttgcaccccgctgcgggcccacgtggttggggccctgcctggcagggtcatcctgtgctcggaggccatctcgggcacaggcccaccccgccccacccctccagaacacggctcacgcttacctcaaccatcctggctgcggcgtctgtctgaaccacgcgggggccttgagggacgctttgtctgtcgtgatggggcaagggcacaagtcctggatgttgtgtgtatcgagaggccaaaggctggtggcaagtgcacggggcacagcggagtctgtcctgtgacgcgcaagtctgagggtctggg

SEQ ID NO: 13115 - DNA, 434 bp, Homo sapiens
atccatcattgcttttgcggtatcagtgcaagtgtccacaaagttaaaaaggcaaatcatgtcttagcattgttatgaaaatagcttcaacctctcaacccaacccccctttccccaaaggctctaggagacctgggggcccacgagccacaccctgaggtctgctctcctagcctgctgtcattgctaaagcctgcacgggcttcgacctgaagggggagctcaaggccttcccaatcttcttccttccctctcctccctgcccaccctttccctcaactttgggacaaaagagaccaggacggaagacacgaagggactctagctttggagttcaaacttccctcattccggctgggcgtggtggcccacgcctgtaatcccagcactttggaaggccaaggcaggcagattacttgaggtcaggagttcgg

SEQ ID NO: 13116 - DNA, 464 bp, Homo sapiens
gttggcagcaaaggtactattgagataaacccacgagacaccatggcaaaggagtcgagtataattggagttactctcttttcctcaaccaaggaggaatttcagcaatatgcatcagcccttcaagctggaatggaaattggctggatgaaacctgtgataggttctcaatatacattggagaaggtggccgaggctcatgaaaatatcattcatggtagtggggctactggaaaaatgattcttctcttatgatgattaattctttcatggatttcctatgtaattagaggtactgtctttcccccagttgtacttaccctatcttttctttaattaacatatcgattccatgagcttcttatgtgaaaaaataagatttttctttagagagcataagcagaagagtaaaatttattgtatagctagcaatatttttttatgccatctgtctcaaatcaaag

SEQ ID NO: 13117 - DNA, 475 bp, Homo sapiens
gggtggcgcgcgcggggacttaaagtaggtatgaagaccagggagacgtcgggccacaagggaacccactgaggtggggaccaaagatggtggctctttgaattggagccaagcgtggtgggcacccgctgagttggcctgtcataaagacggagttgacactttatccatggggcatcctactttccctacctgtcaacagtttccctctagagtggtatattttcaggtgaattccatttatgctattttctttccatctcatttgttccttcatcagtaggctcggtgatgagccttcccgagggcagggtcgatttcatgtttggttcacagatgtataccaaatacttcaaacaggtataccataaccattgaatgaatatgatggaccctaggggaaagacacggttctcctaatccagtccttgaggtgggtgagtgtgaaggcagaaatggaaagtaatggttacaa

SEQ ID NO: 13118 - DNA, 566 bp, Homo sapiens; identical to SEQ ID NO: 2252

SEQ ID NO: 13119 - DNA, 519 bp, Homo sapiens
acagaagggcaaagcccttcagtactttcaccccaagtccctcacccgtgacacctcccatatcccccccctcaaccggaaggctgactgcccggagaatgccaccatgtctctgaagcatctcaccaagaagctgctaaaccgggatatccaggttgggaagagcggacattcctctgtggaagatgcccaggccaccatggagctatataagttggttgaagtcgagtgggaagagcacctagcccggaatccccctacagactagtggcagtggggacgctggtgatatgaggaggcagaggcagcacccaggagaaacagggcagtggaccaatggacagctccaccagctccacatctttggaagctagatttggggagagagaagctctaccccagacttaatacccattgaaatttcacctcaggtgttgtgtcctgtgtctggttaagtgtcccatggaaggggaaagccttcacgtcagaacccaaccctataccttttacttcttaaat

SEQ ID NO: 13120 - DNA, 512 bp, Homo sapiens
gaaaaatgcggcctttgactgaagaggagacccgtgtcatgtttgagaagatagcgaaatacattggggagaatcttcaactgctggtggaccggcccgatggcacctactgtttccgtctgcacaacgaccgggtgtactatgtgagtgagaagattatgaagctggccgccaatatttccggggacaagctggtgtcgctggggacctgctttggaaaattcactaaaacccacaagtttcggttgcacgtcacagctctggattaccttgcaccttatgccaagtataaagtttggataaagcctggtgcagagcagtccttcctgtatgggaaccatgtgttgaaatctggtctgggtcgaatcactgaaaatacttctcagtaccagggcgtggtggtgtactccatggcagacatccctttgggttttggggtggcagccaaatctacacaagactgcagaaaagtagaccccatggcgattgtggtatttcatcaagcagacatt

SEQ ID NO: 13121 - DNA, 584 bp, Homo sapiens
gaaaactgggataaggaaatagagaaaatgcttcaagaggaaaattagctgttcctgaaatagaagaataatccttaacagtctgcaaactgacattaaattctagatgttgacaattactgaatcagaaggcatgaaagagtataattttatgaaattcaaaattattcttttttcaagttgaaacttgcctcttctactttaaaaaagtatatagaacagttacttctaataatcagaaagagatgttttatagaacatttctttaatataaagttagagatgtcttcataggcagtatggctatccttgccacagaaacataagtaaaattttagagttctgttttccatgaggtcaaaaatataatttattcctcagtcatggttttctaaatatctgtactccacattccattttaattgatatgagggtgttaaagtacctacttaatgggttgattactatcaaaatgaccaaattataccaaagaacttaagaggaagcactttcagaactattcacttgccaggtattttctaaaattccacctgaaagccaaaagataaaataaataagttgat

SEQ ID NO: 13122 - DNA, 556 bp, Homo sapiens
ggagcagggtgaggggaatgttatgggtaacagacatgcaggcatggctctacccatttctttgcacaagtatggggcccatgtggtagtccccatacccctccagttcctatatttttgtcttcttcctttcccctctttgccattcctaccttgcatttttcctgtcagtgccttagccaaggcaaggagataaggatctcttcttgctttttatatctgcacattcatacctctccaaagaccagcttttccccagccagggccctcagccttccctgctgccccagtgattgattgagagagctgttggggtttctctgccaatgacccctgggagagggactttggtagggttatgataaagtggcgggggtctggtcctgctcagggttttcatccttcctcctctccctcctctgtgactgtggatatggttataaggtggttgcacctgggagccctgacaactggctgcacaaattccaaaagtaaaggtgtcagtccctgtggccttccttggggcttctctgaccacatgtgcccaacttcaata

SEQ ID NO: 13123 - DNA, 509 bp, Homo sapiens
gatgtttaatgaatgcattttattttataaggctgagtacatatacagatgatcccattttagtttctcagctattttactatatgttaaatattttgatgctgtatttacatattagcatcagcaaccataatttttctgataacttttcaagatcagccaaatcatatccttgacaagtcacactttttctctgaagttttccataaaacccaaattaaaagtgatctgacactggtagcattttacaaatctaccttcatttagcatttatatatgcttttaagttgaagttttttctatatatgaaactgcaagtggttagagggcaggttttgtgttttaggtttgttaatttctctcccaaccagtgtcagattggctcagtctgagtggaggatcaatgaataggtgatgaatgaatggatatctacatgtcagtgcattgacagtgaatacatcttgcttatcatagtgaaagaaacagccggacacagtggctcatgcct

SEQ ID NO: 13124 - DNA, 426 bp, Homo sapiens
accaatgatggcgcgatgtaacacgagaaagcacataccaaggccaccacacaccacctgtccaaaaaggccttcgatacgggataatcctatttattacctcagaagtttttttcttcgcaggatttttctgagccttttaccactccagcctagcccctaccccccaattaggagggcactggcccccaacaggcatcaccccgctaaatcccctagaagtcccactcctaaacacatccgtattactcgcatcaggagtatcaatcacctgagctcaccatagtctaatagaaaacaaccgaaaccaaataattcaagcactgcttattacaattttactgggtctctattttaccctcctacaagcctcagagtacttcgagtctcccttcaccatttccgacggcatctacggctcaacat

SEQ ID NO: 13125 - DNA, 52 bp, Homo sapiens
ggcagggtgggggtgttagccctgggggttcccctccctcttgtgcaccatt

SEQ ID NO: 13126 - DNA, 207 bp, Homo sapiens
agtatggcctgcccatccaggttcgtgacgcaggattgtcttttaaagatgacatgccaaagtcagatgtcaacaaagagtactatacacagaatatggagagagagatttctaactctgatggaacacggccagttggcatgctggggaaagccacatctaccagtgacatgctgctcaaactggcccggaccacaccctactaca

SEQ ID NO: 13127 - DNA, 487 bp, Homo sapiens
gctctctgggatgtgtagctttggaaatctgtctttgttgctctgggagaggggactcctggaatgtgtctgtgaataaagactagccgaagatactgtggcctcatgaataggaatgtctgcccatatgtcaagattggaaataatggatgaagatcaattaatcaaagacgtcttggataaattccttaattgtcatgagcaaacatatgatgaagaatttctgaacacttttactcatctttcacaagaggatcatgtgtccaaaaggggagtgtttggaactgattcttcagaaaacatttttacctcagcaaaagttactcataaaaatgaagcagatgactaccatcttagaaataaaaccatctttcttcgtacttcatcacaatgtttggaagaacaggtagataatttcctagatttagaagatttggacatggatgaagagattaaaccccaaatgagtgaggatttgctgctgctt

SEQ ID NO: 13128 - DNA, 488 bp, Homo sapiens
agaatttaaaagtgaaacccagatttcctgtttggtcaatgagtagataaatatgcctgggataagaagcaggggaaggaagtgggagaaggatctgatgagtttgaggtacctgggagaccctaggaatgttgatatatagatatgaaactccataaaagtgtgatcagctgatcacctataaaaagttgatctgggctgactaatcaatatttggaagtcagaggcagtaaaatgacaaataaaggccttgggtgatgatgagctctctcagggaaaatgtttaaactgcaacaagagaagaaccttagggaagtatcaacatttaaggaatcagttggaaaatgggagcctacacagtagactatgaaggaccaaccaaaaagaacaagaactgggtggtatcatggaaacccagggaagagagggcttcaaaaaggaggatgtggtcagctgtagtgaatattactgagagattgtgatggctg

SEQ ID NO: 13129 - DNA, 508 bp, Homo sapiens
ataggtttggtcctagcctttctattagctcttagtaagattacacatgcaagcatccccgttccagtgagttcaccctctaaatcaccacgatcaaaagggacaagcatcaagcacgcagcaatgcagctcaaaacgcttagcctagccacacccccacgggaaacagcagtgattaacctttagcaataaacgaaagtttaactaagctatactaaccccagggttggtcaatttcgtgccagccaccgcggtcacacgattaacccaagtcaatagaagccggcgtaaagagtgttttagatcaccccctccccaataaagctaaaactcacctgagttgtaaaaaactccagttgacacaaaatagactacgaaagtggctttaacatatctgaacacacaatagctaagacccaaactgggattagataccccactatgcttagccctaaacctcaacagttaaatcaacaaaactgctcgccagaacactacgagccacagc

SEQ ID NO: 13130 - DNA, 558 bp, Homo sapiens
agatattttcctataattccagaatgtcttcagagagccgtgcatggattgcttcattaccttttccatacgagaaaccacaccttcattgtcctgcacctggtcttgcaagggatggtttatactgagtacacctgggaagtatttggctactgtcaggagctggagttgtccttgcattaccttcttctgccctatctgctgctaggtgtaaacctgttttttttcaccctgacttgtggaaccaatcctggcattataacaaaagcaaatgaattattatttcttcatgtttatgaatttgatgaagtgatgtttccaaagaacgtgaggtgctctacttgtgattaaggaaaccagctcgatccaagcactgcagtgtgtgtaactggtgtgtgcaccgtttcgaccatcactgtgtttgggtgaacaactgcatcggggcctggacatcaggtacttcctcatctacgtcttgaccttgacggcctcggctgccaccgtcgccattgtgagcaccacttttctggtccacttggtggtgatgtcagatttata

SEQ ID NO: 13131 - DNA, 579 bp, Homo sapiens
ggctctttcccatcttgcaagatggcgggtgaaaaagttgagaagccagatactaaagagaagaaacccgaagccaagaaggttgatgctggtggcaaggtgaaaaagggtaacctcaaagctaaaaagcccaagaaggggaagccccattgcagccgcaaccctgtccttgtcagaggaattggcaggtattcccgatctgccatgtattccagaaaggccatgtacaagaggaagtactcagccgctaaatccaaggttgaaaagaaaaagaaggagaaggttctcgcaactgttacaaaaccagttggtggtgacaagaacggcggtacccgggtggttaaacttcgcaaaatgcctagatattatcctactgaagatgtgcctcgaaagctgttgagtcacggcaaaaaacccttcagtcagcacgtgagaaaactgcgagccagcattacccccgggaccattctgatcatcctcactggacgccacaggggcaagagggtggttttcctgaagcagctggctagtggcttattacttgtgactggacctctggtcctcaatcgagttcctcta

SEQ ID NO: 13132 - DNA, 595 bp, Homo sapiens
caagtcgcagcagtactagcccaagcatcatcaatgaagatgtgattattaacggtcattctcatgaagatgacaatccatttgcagagtacatgtggatggaaaatgaagaagaattcaacagacaaatagaagaggagttatgggaagaagaatttattgaacgctgtttccaagaaatgctggaagaggaagaagagcatgaatggtttattccagctcgagatctcccacaaactatggaccaaatccaagaccagtttaatgaccttgttatcagtgatggctcttctctggaagatcttgtggtcaagagcaatctgaatccaaatgcaaaggagtttgttcctggggtgaagtacggaaatatttgagtagacggggccctcttttggtggatgtagcacaatttccacactgtgaaggcagtattagaagacttaattgtaaaagctctcttgtcactgtgttacacttatgcattgccaaagtttttgttagtcttgcatgcttaataaaagtgctgagactgttactaagtaaaaagctgtcaaacatttactgaaaatagaattggccccatagcttgatgtga

SEQ ID NO: 13133 - DNA, 504 bp, Homo sapiens
  misc_feature 66: n = A,T,C or G
ctgggtagatgctcatatgaactgtgaagatattgccatgaacttcctggtggccaacgtcacggngaaaagcagttatcaaggtaaccccacgaaagaaattcaagtgtcctgagtgcacagccatagatgggctttcactagaccaaacacacatggtggagaggtcagagtgcatcaacaagtttgcttcagtcttcgggaccatgcctctcaaggtggtggaacaccgagctgaccctgtcctgtacaaagatgactttcctgagaagctgaagagcttccccaacattggcagcttatgaaacgtgtcattggtggaggtctgaatgtgaggctgggacagagggagagaacaaggcctcccagcactctgatgtcagagtagtaggttaagggtggaaggttgacctacttggatcttggcatgcacccacctaacccactttctcaagaacaagaacctagaatgaatatccaagcacctcgagctatgcaacctct

SEQ ID NO: 13134 - DNA, 553 bp, Homo sapiens
acagaagggactttgcgggcggcactttttccaggttgttaatccagctaatggagaaggatagatgcacgctacttggtttagaaaaaaaaacaaaaatgagcaaacgagacgccccttccgttttatgataactaagctgcagggaaataaatcggctggccctactgcaatctactgcactcgagaaacatcacagaaaattctttgatttatcttaatagtgacaagtgagcctgcctctgtcaattactgaagctataaggagattttttaaaaattaaacttcaacacaatgaggtgttgccacatctgcaaacttcctgggagagtgatggggattcgagtgcttcgattatctttggtggtcatcctcgtattattactggtagctggtgctttgactgccttacttcccagtgttaaagaagacaagatgctcatgttgcgtagggaaataaaatcccagggcaagtccaccatggactcctttactctcataatgcagacgtacaacagaacagatctcttattgaaacttttaaatcattat

SEQ ID NO: 13135 - DNA, 583 bp, Homo sapiens
ggattggtgggaaggggattggggtggggcaggctggcttaatgtaatatgagcaaccaaagtgggacttctgtctccccgctatattcccattgctctgaatggttgattgaagggtcagggaactagattttatggctttagttcactgtgattgtacatttatacttggcctatgtgctggccgcacctgaacatagctggtgcttatgccgagttatttgcgatgagtaaatatttagtttctttttcttcatatttataatgttgatctggcatcctcaggctgcagctttattagcttataacttactcatctctatctttaccagcaggctctgtattgttgatatttgcaacttgttttgcttttccattggtggaattgaaataattagtttttaattacataagatgcctgtttgctatttggtggaagatagatgttcatattgaagcagtcacatttgtactgtagttcaataaaagagaaatgaagtattctgtagcctatatttttcatagagctcatgagcatttactgtacttgctgggtcttgccaagatcatttattccgctgca

SEQ ID NO: 13136 - DNA, 477 bp, Homo sapiens
ggatctaagctataaccacttgaccttcattccagaagaaatccagtatctgagtaatttgcagtactttgctgtgaccaacaacaatattgagatgctaccagatgggctgtttcagtgcaaaaagctgcagtgtttacttttggggaaaaatagcttgatgaatttgtcccctcatgtgggtgagctgtcaaaccttactcatctggagctcattggtaattacctggaaacacttcctcctgaactagaaggatgtcagtccctaaaacggaactgtctgattgttgaggagaacttgctcaatactcttcctctccctgtaacagaacgtttacagacgtgcttagacaaatgttgacttaaagaaaagagacccgtgtttcaaaatcatttttaaaagtatgctcggccgggcgtggtggctcatgcctataatcccagcactttgggaggccaagatgggcggattgcttg

SEQ ID NO: 13137 - DNA, 116 bp, Homo sapiens
gttctgggcctagttgtcctccctctggagccccgtcctgtggtctgcctcagtttcccctcctaatacatatggctgttttccacctcgataatataacacgagtttgggcccgg

SEQ ID NO: 13138 - DNA, 397 bp, Homo sapiens
tccaccgcggtggcggccgctctagaactagtggatcccccgggctgcaggaattcggcacgagaagatattcacgttgaaacagatttcctgttcgtcttatgtgtctggtaaaattgtttccccaattacaatttgacatatcaatagagggttaacaagagtataattacataacagaattcctcatgaactgtaatcagtctacaggaaaatcattattttatcttgatttgcagatgaatatactgctaagaaagggagcaactctgacctttgttaaagttgatcttttgtaattgaggtataaggtatgaaaagataaaaaaccgaaggccagagaatcaggaaatgaaagatagtatggactgaaggtaacaatattttaatgttatgc

SEQ ID NO: 13139 - DNA, 615 bp, Homo sapiens
cggcacgaggtttttttctgcccaatttcattattggggtgtgaatccttgttgatgtttactgtctatttattttgaagatactaatcctatatttttgtaagtcaatgtcctccggccaggactacaagaaaccaactttaattaagcaagttggttttattactcagtcatgagttatggagaatttcagggcatctcagcacgaggatgttaggaagatcctatacagattttgggcttttatttggggattttggaaagggttgaaggaagcaggctttgctccagactgaatgctgcaggaagatactcagtacagtgagtatattttatatatcttttgtatagggaggacaggtgagagagatactaaagctgtaattggtcaagaagtagcagctatagtactggtataaagatagatacatcgacctgtctctattctggaacagaacaaacccttgcgtgtggagtcctaattagggaaaaggagtcaggctggctggacgaagggaagcaaaaggagaaagcagacaagccataagtctgcctttcttcgtggtccaggacacatagccctgctgtgcaaataactcacaatctgcctgtgcc

SEQ ID NO: 13140 - DNA, 636 bp, Homo sapiens
gacagagggggggcggagaacaaggagagggaagctggaagcacctttggcccgggacagaaatctggagagcttggctacctccatcctcctcaggccggagcaggcctcctgagagagtccaggtcgtaggagttttacgacttagaaaagcgggctgcagattccttcctgggtgtctggttcaagccttggctccagcctcactctcagtcttcccgggagttcgtgggatttggaccttagattattagtattattttgagggcctcctgtgtgtaagcactggttgtgcgcagatggctgtgcagagggccatgaggtagaggctggggaaatgagggcttggaggtgcttgaggtatggtctttacctacgtgaaatgttggaggttgagatgaaaactcttgctttgaattcttcatggaggactacatcatttcaatcctgaatctggctcaattctattattcacttattactgtattaaaaacgtttaattggccaggcacagtggttcacgcctgtaatcccagcactttgggaggccaaggcaggcggatcacttgaggtcaggagttcgacaccagcctggccaacatggcaaaaccccgcctctactaaaatacaaaatta

SEQ ID NO: 13141 - DNA, 618 bp, Homo sapiens
  misc_feature 458: n = A,T,C or G
acagagggggggcctccgccaccatcttgctttcctttaatccggcagtgaccgtgtgtcagaacaatcttgaatcatgaagctactaaccagagccggctctttctcgagattttattccctcaaagttgcccccaaagtcaaagccacagctgcgcctgcaggagcaccgccacaacctcaggaccttgagtttaccaagttaccaaatggcttggtgattgcttctttggaaaactattctcctgtatcaagaattggtttgttcattaaagcaggcagtagatatgaggacttcagcaatttaggaaccacccatttgctgcgtcttacatccagtctgacgacaaaaggagcttcatctttcaagataacccgtggaattgaagcagttggtggcaaattaagtgtgaccgcaacaagggaaaacatgacttatactgtggaatgcctgcggngtgatgttgatattctaatggagttcctgctcaatgtcaccacagcaccagaatttcgtcgttgggaagtagctgaccttcagcctcagctaaagattgacagagctgtggcctttcagaatccgcagactcatgtcattgaaaatttgcatgcagcagc

SEQ ID NO: 13142 - DNA, 556 bp, Homo sapiens
gacagagggggttgcccgcctggcccctgacggagtccttagccaggatggaggctgttgtgaacttgtaccaagaggtgatgaagcacgcagatccccggatccagggctaccctctgatggggtcccccttgctaatgacctccattctcctgacctacgtgtacttcgttctctcacttgggcctcgcatcatggctaatcggaagcccttccagctccgtggcttcatgattgtctacaacttctcactggtggcactctccctctacattgtctatgagttcctgatgtcgggctggctgagcacctatacctggcgctgtgaccctgtggactattccaacagccctgaggcacttaggatggttcgggtggcctggctcttcctcttctccaagttcattgagctgatggacacagtgatctttattctccgaaagaaagacgggcaggtgaccttcctacatgtcttccatcactctgtgcttccctggagctggtggtggggggtaaagattgccccgggaggaatgggctctttccatgccatgat

SEQ ID NO: 13143 - DNA, 449 bp, Homo sapiens
gttcatccagcctgagtgctctgagcctcgatgagccatttatacagaaagatgtggaattaagaataatgcctccagttcaggaaaatgacaatgggaatgaaacagaatcagagcagcctaaagaatcaaatgaaaaccaagagaaagaggcagaaaaaactattgattctgaaaaggacctattagatgattcagatgatgatgatattgaaatactagaagaatgtattatttctgccatgccaacaaagtcatcacgtaaagcaaaaaagccagcccagactgcttcaaaattacctccacctgtggcaaggaaaccaagtcagctgcctgtgtacaaacttctaccatcacaaaacaggttgcaaccccaaaagcatgttagttttacaccgggggatgatatgccacgggtgtattgtgttgaagggacacctataaacttt

SEQ ID NO: 13144 - DNA, 238 bp, Homo sapiens
gatgttgggtaagtcaagggatagtttaataagatttaactgagctcaaagtagtacaaaatggatatgatttatttcctatagagcattaatttaatggtggtataatttaaatgagaaggaatatccccaaacccagattttattttcttttaaaacatttgcaaaatatttcttcagaattttatactctaaaactgttttctaaaagaaaaaattctccagtcatgatctgaat

SEQ ID NO: 13145 - DNA, 523 bp, Homo sapiens
aactgctgttagacactactgtagggtgatctatacgaaaactataccatgatactctgaagcgctgcattcatatgtattccttcatggtctaaaacaactgagcatgtcctccaaataatcttaacatttagtacactttgaaactactcacctatcaaatttttgcttaaaaaacagattgccggccaggtgctgtgcctactcatgcctgtaatcccagtactttgggacgccaaggcacgaggattgcctgaccccaggagttcaagaccagcctggccaatatggtgaaaccctgtctctactaaaaatacaaaaattagctgggtgtggtggcagacgtctgtagtctcagctactcaggaggttgaggcacaagaattgcttgaaactgggaggtacaggttgcagtgagccgagattgtgccactgcactccagcctgggcgatagagggagactctgtctcaaaaacaaacaaaaaaacccagactgccatcattacatattctatgcatgta

SEQ ID NO: 13146 - DNA, 191 bp, Homo sapiens
agctaaaatggaccaattccttgcaagacgcattctctcaaagctcacacaagatagacctcaataggcatatgtatctattaaataaaccaaagcagtaattaataaccttccaaggccaggtacagtggttcatgcctgtaatcccagcacttcactttgggaggctgaggcgggtggatcacaaggtc

SEQ ID NO: 13147 - DNA, 585 bp, Homo sapiens
gggccatgaacagtgtgggggaggcatgcacggacatgaagcgcgagtacgaccagtgcttcaatcgctggttcgccgagaaatttctcaagggggacagctccggggacccgtgcaccgacctcttcaagcgctaccagcagtgtgttcagaaagcaataaaggagaaagagattcctattgaaggactggagttcatgggccatggcaaagaaagcctgaaaattcttcttgaccttgacagtcaccttgaaggatttcgcaagtccagaaattgaggactctggatttttgtcaactaactctgtgaacatagccatcagatttgatgaggaacttaggagagaggagttttatttcctccttcgatgttttcctctcagttgtaaaagatgaactctttgagatgatttctcacctgctgtggtatcttgcaggaactgtgtgctaaaattgaacaatttttttgagattatggttgcaatacttggcgtggaatcagctttacataaatataccttgtatgcaaacgatgataaactagtcaggatgagcagagctgcctgacctcttgatttctgctgc

SEQ ID NO: 13148 - DNA, 139 bp, Homo sapiens
gaacaccgaatagaaggccgggcacagtggctcacgcttgtaatcccaacactttgggagaccaaggtgggtgatcacctgaggtcaggagtttgagaccagcctggccaacttagtgaaaccctgtctctactagaaa

SEQ ID NO: 13149 - DNA, 329 bp, Homo sapiens
gtatctattaaataaaccaaagcagtaattaataaccttccaaggccaggtacagtggttcatgcctgtaatcccagcacttcactttgggaggctgaggcgggtggatcacaaggtcaggagttcgagaccagcctggtcaacatggtgaaaccccctatctactaaaaatacaaaaaattagctgggcatggtggcatgcgtgtgtagtcgaagctactcaggaggctgaggcagaagaatcacttgaacctgggaggtggatgttgcagtgagctgagattgtgccactgtactgcagcctgggtgacagaatgagactgcatctc

SEQ ID NO: 13150 - DNA, 470 bp, Homo sapiens
  misc_feature 177: n = A,T,C or G
gtacctgcctagcaacagtattctcattcctaaagaggttaatatgcagatctggcagaggacggaaattaagtggagaccaaataactttgccaactacagttgattattcatcagttcctaagcagacagatgttgaagagtggacttcctgggatgaagatgcacccaccagtnttaaagatcgaaggagggaatgggaatgtggcaacacaacaaaattctttggaacaactggaacctgactattttaaggacatgacaccaactattaggaaaactcagaaaattgttattaagaagagagaaccattgaattttggcatcccagatgggagcacaggtttctctagtagattagcagctacacaagatctgccttttattcatcagtcttctgaattaggtgacttagatacctggcaggaaaataccaatgcatgggaagaagaagaagatgcagcctggca

SEQ ID NO: 13151 - DNA, 529 bp, Homo sapiens
gacagagggggctgaaggagtctcgctgagctcgaggaggtggcgcgatggagggactggaagagaatggaggtgttgtccaagttggagaattgttaccttgcaagatttgtggaagaacattctttccagtagcattaaaaaaacatggacccatttgccagaagactgcaactaaaaaacggaagacttttgattcaagcagacagagagctgaaggaactgatattccaacagtaaaacctctcaaaccgaggccagaaccaccaaagaaaccatctaattggagaaggaaacatgaagaattcattgctaccataagagcagctaaaggccttgatcaggccctcaaagagggtggcaaacttcctcctcctcctccaccttcttatgatcctgattatattcaatgtccatattgtcagaggagattcaatgaaaatgcagctgatagacatataaatttctgtaaagaacaggcagcacgtattagtaataaagggaaattttctacagataccaaaggaaa

SEQ ID NO: 13152 - DNA, 450 bp, Homo sapiens
gacctaagaaaagctggattgctgatttttgctaataaacaagatgttaaagaatgcatgactgtagcagaaatctcccagtttttgaagctaacttctattaaagatcaccagtggcatatccaggcatgctgtgctctaactggcgagggattgtgccaaggacttgaatggatgatgtcacgacttaagattagatgatctctactgacctcttctcatagattttgtataaatgaagtgctggactttacctgaaagctgcaaaaattaatggtttagatatatttataataaactgatttaaactttttctataagaagaaaaattaagaccacttatttgaaaacaaagatgaagtctcaccttccagtttgctttctcattagttttttccaaagtaagttattgaagctgtgattgacatttttctcataatgaatcctctc

SEQ ID NO: 13153 - DNA, 302 bp, Homo sapiens
gagacagagtctcgttctgtcgcccatgctggaatgcagtggcacgatcttggctcactgtaatctccgcctcccgggttcaagtgattcttgtgcctcaccacgcccagctaatttttgtatttttagtggagagggaatttcaccatgttggccaggctcatctcgggttcctggcctcaagtgatctgcccacctctgcctcccagagtcctgggattacaggtgtgagccaccacacttagctgtatacagctcaccataataaataaataatacataaaaatccataatgaatcctc

SEQ ID NO: 13154 - DNA, 496 bp, Homo sapiens
aaagaaatagtgggggacaaagaatcccttcctaatttccctgcagtcccatcataggcatgaccatcgcatctctttatggctgaagcttagcctgactgctggacccagacttttgcccagtgacctctggggtaggttactatcctctttgtcctgccagtacccctagaggtttgacttaattgctgcatctagggacttagggatttttcccaaatgctgtgtagaaagtcactggagttaaatctactccaaccatttttctgctgtttcttgaaaagacaggatgattcatttacatctcttttccttcacagaatcatgagggaagtattgtgattaccagtgttaagcatttgtgaatattttattccaaaaagaaaaaaaatcactttaccagccttttctgcagagataaagactggaggtcaggtgcggtggctcatgcctgtaatcccagcactttggaaggctgaggcgggcagatcacctg

SEQ ID NO: 13155 - DNA, 570 bp, Homo sapiens
gaactgaaagcgatgaaaagcgttccacacgccacgagcccgcgggatcctcggagagtatggaacccttcccctccgctctcagccggaggccagctgcgtccagccgggctcggtcttctgaacaccgatttcaaatcaggtccccggggcccagcgtcacttagggaagtggtggcattttgtggttgctgctaaatcacggagagcagccttggcgctgccggtcccaacttgatccaaggagccttgagaaggagatgagattcagtaccaggggccggccgtggctcccatcctccggaatctgcaaaatggctacttcttcagaaataatggggagagggatggcaagaggccagagatcaaggccctcgagtattaacttgagcatttgggcacaaaatagacacttttggattttcccgtcttttccaacaccaaggatgagattatcaaaagatgtgttaaattaatttgtaccggccgggcgcggtggcttacgcctgtaatcccaacactttgggaggccgaggcgggcgaatacaaggtcatgagttcgaaaccagc

SEQ ID NO: 13156 - DNA, 202 bp, Homo sapiens
agcttgcggccgcggtttttttttttttttttttcggattaaaccggttaaaaaaaccccgtccggggaaaaaaggaccccttaaacccgggcccaggggggcacatttacagccccatttatttggaaggttaaaccaggagaataatttaaccccaagaggtttaatcccatttgggccaacaaagaaaaaattttgttt

SEQ ID NO: 13157 - DNA, 414 bp, Homo sapiens
tcggcacgaggcctcgtgccggaaagtcttatctttgccagcctcaaaaataggtcaagaagaaacagtctctcggtttacagttggacagttgtagcctcaagaacaaatgaggtattaatattagctaggaatctctgacaaggaccagaacttgcatcctcagatatcttcagtgttgtgggtcttcagcacagccttgaagataattcctaaaaaggctcagtccacaaaaatatcaccaacttcaaaacaaattcacatcacatcattattgctcaggaacaaatgcttcagataaaagtagaaaagccagataactcaaactacagaggaagaaatgagacctcaaacttttgctgccacttgggaacaacatttttttttttagatagggtctcactctgtcaccca

SEQ ID NO: 13158 - DNA, 550 bp, Homo sapiens
ggcagaagcggctcgaggctggaagaggatcttgggcgccgccaggttctgtggacaatcacaatgggaatccaaggagggtctgtcctgttcgggctgctgctcgtcctggctgtcttctgccattcaggtcatagcctgcagtgctacaactgtcctaacccaactgctgactgcaaaacagccgtcaattgttcatctgattttgatgcgtgtctcattaccaaagctgggttacaagtgtataacaagtgttggaagtttgagcattgcgatttcaacgacgtcacaacccgcttgagggaaaatgagctaacgtactactgctgcaagaaggacctgtgtaactttaacgaacagcttgaaaatggtgggacatccttatcagaaaaaacagttcttctgctggtgactccatttctggcagcagcctggagccttcatccctaagtcaacaccaggagagcttctcccaaactccccgttcctgcgtagtccgctttctcttgctgccacattctaaaggcttgatattttccaaatggaccct

SEQ ID NO: 13159 - DNA, 329 bp, Homo sapiens
gacaataagatggactagagttcgacaaaatgatttctttatttaaattttgtataagtattttcttcgacactttcaaattatattgtgttcttgatatatgctgtatatttatttgttagtgcatgtgtttttaatttacatgaaaacatgagttaggagaaattacaggttgaaagatgaaatgcctgtatgtgctctgaagaaatggtaattccagattgtgcagggggaaacaaatctattttgttttgttttgttttttgagacggagtcttgccctgtggctgggctggagtgcaatggcgcgatcttggctcactgcaacc

SEQ ID NO: 13160 - DNA, 538 bp, Homo sapiens
gacagaagggtgcctcttgccaaagcagcacccaaatctggtccttctgttcctgtctcagtacaaactaaggatgatgtctatgaggctttcatgaaagagatggaagggctactgtgacagcttttgatgccagaaaaggcttctgttcacaacagtggcccatggagaaagaggctcttattaaacttagatgaaagagctgcttccattgtcagggtattttctaatttcagttcaaggaatatcctaaaatttagccttgttcagaatttactgcacataaaaaagggtatttcatccagaatagatcagttattgaagcagtgctgctaacatccattccctttcataccaccattttcaccctgtttcttcccctcctccagttctttggaaatttgtgatcgggggatcttagttgcttatttgttttgactcttgtgtgctgtgggcactggagtagagatttctggagaaaaaaaaacagtttatttcatcttgccttttgtgtttgagttatttttaatattttcct

SEQ ID NO: 13161 - DNA, 563 bp, Homo sapiens
taaggaatgccaaaggctccaaaaacaaataaacaaactttcagatcaatcagctaataataataatgtcttcacaaagaaaacggggaatcagcagaaagtgaatgatgcttcagtaaacacagacccagccacttctgcctctactgtagatgtaaagccatcaccttctgcagcagaggcagattttgacatagtaacaaaggggcaagtctgtgaaatgaccaaagaaattgctgacaaaacagaaaagtataataaatgtaaacaactcttgcaggatgagaaagcaaaatgcaataaatatgctgatgaacttgcaaaaatggagctgaaatggaaagaacaagtgaaaattgctgaaaatgtaaaacttgaactagctgaagtacaggacaattataaagaacttaaaaggagtctagaaaatccagcagaaaggaaaatggaaggtcagaattcccagagtcctcaatgtttcaaaacatgctcagagcaaaatggttatgttctcacattgtcaaatcacaaccagttctgcaatatggtaatccttatgcatc

SEQ ID NO: 13162 - DNA, 447 bp, Homo sapiens
acagaagggagatgttgggccttttggatagattctgtgagtccttctttctacctttgcttgtagataagattttccttgaatacaaacacacacactctctctgctttttaaaaaattagttttggggctggatgtagtggcttacacctgtagtcccaggcactttgggaggccgaggcaggcggatcacttgaggtcaggagttccagaccagcctggccaacgtggtgaaaccccgtctctactaaaaatacaaaaagtagctgaatgtggtggtgtgcacctgtagtcccagctgctcaggaggctgaggcaggagactggcttgaacccgggtggcagatgttgcagtgagccgaaatcacaccactgtactccagcctggtgacagagccagactgttttaaaataaataaaaataaaaaattggttttggattttaaa

SEQ ID NO: 13163 - DNA, 445 bp, Homo sapiens
ggcagagtcgagagtgggagaagagcggagcgtgtgagcagtactgcggcctcctctcctctcctaaccccgctctcgcggcctacctttacccgcccgcctgctcggcgaccagaacaccttccaccatgaccacctcagcaagttcccacttaaataaaggcatcaagcaggtgtacatgtccctgcctcagggtgagaaagtccaggccatgtatatctggatcgatggtactggagaaggactgcgctgcaagacccggaccctggacagtgagcccaagtgtgtggaagagttgcctgagtggaatttcgatggctctagtactttacagtctgagggttccaacagtgacatgtatctcgtgcctgctgccatttttcgggaccccttccgtaaggaccctaacaagctggtgttatgtgaagttttcaagtacaatcg

SEQ ID NO: 13164 - DNA, 632 bp, Homo sapiens
acagaaggggcagatggttactctgttctggaatgggactctgcagctctatgcagtggccaacattctgagcactttgtgcaaatgcttgtagagctcaagaacgtctccatccagaaccccttccccatctgcagagaccatgtccaggcctttcttgtgtctgcagaggtgaagtgcacatgtggaaagggatcaaatgtagcacagtgtaaagaaagacagcaacacaggtagagggacccagtgtgtgctgggaggtggctgtggaaggtaagtatagacctacatctctgttggggaggtggtcagggcagaatggcctgggtgtttagcagcttctaggggtgagggtggcaggaccccaaaaccaaggccctctgcatcgttgttgtaataatcagctctggcatattcagctgcaactgtccctgaagaagaggtttctgagctggctgaccccatgtaggagggtgttaccttgtagaaaaagctggagggacctggtgggacagtgcagtgaggcagggtagaaatggtcagttgtttagggccagtggccacataccaaaataccaccaatgtgcccagggccaaactgccttaattctgagtgctgtgtgttctgcagg

SEQ ID NO: 13165 - DNA, 304 bp, Homo sapiens
atcatctctgctaaccagctagtagctaaccagctgaaggaggaatttagagtaagctagacatttctatctgctgaacttttatttagtccttgtgtgacttctgaacttttgcaatgaaaaaaattactggccaggcatggtggctcgttcctgtaatcccagaactttgggacgctaaggcaggtggatcacttgaggccaggagttcgagaccagcctggcccacactgtgaaactctgtctctactaaaaatacaaaaattagctgagcgtggtggtacatgcccataatctcagctac

SEQ ID NO: 13166 - DNA, 112 bp, Homo sapiens
atggagtgagagagagagagagagagatatgacaaggagcacaagaagtggtccatctcccgaattcgctgttaccgcctgtctctttaagggcatgccttgtgctgttaat

SEQ ID NO: 13167 - DNA, 624 bp, Homo sapiens; identical to SEQ ID NO: 2344

SEQ ID NO: 13168 - DNA, 530 bp, Homo sapiens
acagaagggataatcctttaagatatgaatgtatcttttaagaaacatattaaagtatatcaattctgtcattacaaattctttgacagaatctcttcaaataaattagaggaagcatctgggcattattttataaagcattttacgagcacatatagcaaactagatgaaatatttcatggaaaaacacatagaacgtgagttttatgtaaacaagaaatatttttcagtattccaaagtgctgggattacaggcgtgagccactgtgcccagccatctcttcttttaaaaatgattttgcatctgtacttctgtctgagttgcattaaattttgccagaattagacattttattgtgttaagcttttggaagggatgactgagctaacccccccctcttttttacttttaaacaaattttattttatttatttatttattttacctttgtcctgaactctcttacattgatgtgtcattatctatatatagagcactaaggtatactcttattggatgtgggaggatg

SEQ ID NO: 13169 - DNA, 627 bp, Homo sapiens
acagaagggatatgacctcattaaatgtgctgttttatttggaccagtcacacaaaatgtctctctagagttgactttaaagttgtttacagaaatttaaactcaattccagagattgaagttgtccaaacagctcatgggcttagtgtccaaacccctgcccagccttccctttccaagttggtgccacctccaggtagccattggtggttttcctattactgatgtggctgtggaatgataaggtcctagaggggccctggcatttcaggaagcggacctggtattccctgacaaacattgcttaggaaagagggccggagaataagaagccagcacctcatcagtcagccctgcaatgtgagacttccgtagctgttgagagtcactgcaggtgttctttcatcccgtctgattttaacccatggttgagacgttccaagttagatctgctgctcttaggtgtggggctgtccacattagggaacttgcctcaaaaacagtccacagtggcaataccggacttctgttcaagctttttaaagtgctgagtcttacaaacccctgaaggaaggtgaccctttaagagaggatcatctttttttatatttattttcaccaaatagg

SEQ ID NO: 13170 - DNA, 193 bp, Homo sapiens
tacggctgcgataagacgacagaagggtacggctgtgagaagacgacagaagggtactgctgcgagaagacgacagaagggtacggctgcgagaagacgacagaagggtacggttgcgagaagacgacagaagggtactgttgcgagaagacgacagaagggtacggcctgcgagaagacgacagaagggtac

SEQ ID NO: 13171 - DNA, 476 bp, Homo sapiens
acagaagggtcaggtatttaatcttcgtttccgtatctgagtaaatggtgctgataaacatgcatactctcttggaatgtggtaataactaagtgcccgagtgaatgaccactctcaaaaattggtacattatcttatgattctagtgatatcagattttctcatgttttgttttgtgttgtttgtttttgggtttgtgtatatttccaatctttttattttagaagatattgatgctgatggacagggattttgtcaaggaggattcagcattgattttactaaagctgacagagtacttcttggtggtcctggtagcttttattggcaaggtaggttaatattttttaaattacaattggtgactatgtgtcgctgattcacctggctaattgtatgcctatgacattttacaaattattttaaagaaagaaatggaaatacaattaaagtatataaacactccattttacaca

SEQ ID NO: 13172 - DNA, 662 bp, Homo sapiens
tcggcacgagggtggtcactgggcacttaacgccatacttcctgactgtgtgcaagccaaactacaccagtgcagactgccaagcgcaccaccagtttataaacaatgggaacatttgtactggggacctggaagtgatagaaaaggctcggagatcctttccctccaaacacgctgctctgagcatttactccgccttatatgccacgatgtatattacaagcacaatcaagacgaagagcagtcgactggccaagccggtgctgtgcctcggaactctctgcacagccttcctgacaggcctcaaccgggtctctgagtatcggaaccactgctcggacgtgattgctggtttcatcctgggcactgcagtggccctgtttctgggaatgtgtgtggttcataactttaaaggaacgcaaggatctccttccaaacccaagcctgaggatccccgtggagtacccctaatggctttcccaaggatagaaagccctctggaaaccttaagtgcacagaatcactctgcgtccatgaccgaagttacctgagacgactgatgtgtcacaagctgttttttaaaatcatcttccaattctatacttcaaacacacagttgctcaatgtcaaactgtgatgacaaatattacgtttatctagtt

SEQ ID NO: 13173 - DNA, 498 bp, Homo sapiens
gcgccgctccaacatcaccaagatgtggcttctgcagctccagaaaaagcagagaaccctgctggccatggtccaaggaggtgaaaggcaaaactcacacttactatcaggtgctgattgatgctcgtgactgcccacatatatctcagagatctcagacagaagctgtgaccttcttggctaaccatgatgacagtcgggccctctatgccatcccaggcttggactatgtcagccatgaagacatcctcccctacacctccactgatcaggttcccatccaacatgaactctttgaaagatttcttctgtatgaccagacaaaagcacctccttttgtggctcgggagacgctaagggcctggcaagagaagaatcacccctggctggagctctccgatgttcatcgggaaacaactgagaacatacgtgtcactgtcatccccttctacatgggcatgagggaagcccagaattcccacgtgtactggtggcgct

SEQ ID NO: 13174 - DNA, 153 bp, Homo sapiens
ctgaagtgggagctgacttctctgttgcaccttcaccctacttagggacactaagggttcctgcctggagaatgaaaacaactccttagatctaatcgttttatttgttagtttaggacattcctccagaatacattaaagtggctttcttca

SEQ ID NO: 13175 - DNA, 650 bp, Homo sapiens
  misc_feature 552: n = A,T,C or G
tccaccgcggtggcggccgctctagaactagtggatcccccgggctgcaggaattcggcacgagaagatattcacgttgaaacagatttcctgttcgtcttatgtgtctggtaaaattgtttccccaattacaatttgacatatcaatagagggttaacaagagtataattacataacagaattcctcatgaactgtaatcagtctacaggaaaatcattattttatcttgatttgcagatgaatatactgctaagaaagggagcaactctgacctttgttaaagttgatcttttgtaattgaggtataaggtatgaaaagataaaaaaccgaaggccagagaatcaggaaatgaaagatagtatggactgaaggtaacaatattttaatgttatgcaatatagccagagaaatattaaaaattagttgtttgctgtgcataggtggatctcgcaggaagctaatgaaacctaagcttcagtgcctctcacttagacatgttccattcgaggtcctgaacctaactttgtattaggaattctgtactaattntgttgaagaagaccagcaaagttgtgtacacttctacccccacaaaatctgcattgaccatgtgagtaaagtaaaataattcctgttatttttttctg

SEQ ID NO: 13176 - DNA, 93 bp, Homo sapiens
tttgttcacagggaggcaaagctgacatgaaccttttgtcgtgggacttcaggccacattggcttgaaggcattcgtttccttcttggctctg

SEQ ID NO: 13177 - DNA, 528 bp, Homo sapiens
ggtgggaagagttagggccagtggtcttgaaaatcaatcaagtagtgaatgtgatctctttgcagagctatagatagaaacagctggaaaactaaaggaaaaatacaaatgttttcggggcatacattttttttctgggtgtgcatctgttgaaatgctcaagacttaattatttgccttttgaaatcactgtaaatgcccccatccggttcctcttcttcccaggtgtgccaaggaattaatcttggtttcactacaattaaaattcactcctttccaatcatgtcattgaaagtgcctttaacgaaagaaatggtcactgaatgggaattctcttaagaaaccctgagattaaaaaaagactatttggataacttataggaaagcctagaacctcccagtagagtggggatttttttcttcttccctttctcttttggacaattgttaaattagcagtattagttatgagtttggttgcagtgttcttatcttgtgggctgatttccaaaaaccacatgctgctga

SEQ ID NO: 13178 - DNA, 289 bp, Homo sapiens
gatctcggctcactgcaagctccgcctcgcgggttcacgccattctcctgcctcagcctcccgagtagctgggactacaggcgcccgccaccacgcctggctaattttttgtatttttagcagagacagggtttcactgtgttagccaggatggtctcaatctcctgaccttgtgatctgcccgcctcggcctcccaaagtgctgggactacaggtgtgagccaccgcgcccggcctcagcgaagttgattgatccaccatctcattagtttaaatctgccatctgatt

SEQ ID NO: 13179 - DNA, 380 bp, Homo sapiens; identical to SEQ ID NO: 2367

SEQ ID NO: 13180 - DNA, 435 bp, Homo sapiens
gatttttgtttggccttgcattgccttggtaaagtaaaaggaaacagtacacttggagctaggaaaccaaagcaagctttgtgaaactggcacagtgatagagaattgctgtggagagttatagagcaaagggatgggtccttgaggcctgccagtgtgtaaaggtgttcaaataaagggctgtttctacaggtaacattaaatgtgaactcaacacttccagagtctttaaagggtttctatgtgtatcagtgtaatagtgttttaccaccaactgcctttctttgttcctagttactgtaacaaatatttgatgatagaggtttattaattttgtttatccagaccattaattttatttgtttttgttctatgtaatcaaataaaatttgagtaacatgtaatggtaaggattaatgcatggttatttggacc

SEQ ID NO: 13181 - DNA, 541 bp, Homo sapiens
acagaagggattccaagttgataactcttccatgtttcacatttctaaatttaacagagatgctgtagcttaaaacatgttttgataagtaattacactggacctaggcaaaaccactgaagaacaagtgttcctttttaccacatacatattatgttttgatcactgctgcttgagccccgctattggtataattcagatcattttagcttgttgctgaggatgtcacatataagacaggatcaaacctgaaagacactaatggttcatcctctataaggccaacaaagaaaacaaattaatgtgatgtaacttgcatttatgtgcactctgcataggtttcccaataatactgtaatgttgctgaacacctttccctgttttccatttatacacatattaaagtcatattgggaaagatggcaaagcttttgagaatataaacacacctgttttgtttttcttaagttcaacatacttttgtagaatttgtaaaataaatgttcgtatcataattgagaatttatagccaaggatcctc

SEQ ID NO: 13182 - DNA, 266 bp, Homo sapiens
tacggctgcgagaagacgacagaagggtacggctgcgagaagacgacagaagggtacggctgcgagaagacgacagaagggtacggctgcgagaagacgacagaagggtacggctgcgagaagacgacagaagggtacggctgcgagaagacgacagaagggtacggctgcgagaagacgacagaagggtacggctgcgagaagacgacagaagggtacggctgctagaagacacagaagggtacggctgctagaagacgactgaa

SEQ ID NO: 13183 - DNA, 472 bp, Homo sapiens
tgcctcaatattctttatctgcctcttcctacacatcgggcgaggcctatattacggatcatttctctactcagaaacctgaaacatcggcattatcctcctgcttgcaactatagcaacagccttcataggctatgtcctcccgtgaggccaaatatcattctgaggggccacagtaattacaaacttactatccgccatcccatacattgggacagacctagttcaatgaatctgaggaggctactcagtagacagtcccaccctcacacgattctttacctttcacttcatcttgcccttcattattgcagccctagcagcactccacctcctattcttgcacgaaacgggatcaaacaaccccctaggaatcacctcccattccgataaaatcaccttccacccttactacacaatcaaagacgctatctacgtagatccagacatgataagatacattgatgagttt

SEQ ID NO: 13184 - DNA, 581 bp, Homo sapiens
gggctgtgcagggcaggggaagctccaggcaaacagcccagcaaacagcagcactcagctaaaaggaagactcacagaacacagttgaagaaggaaagtggcgatggacctcatcccaaatttggcggaggaaacctggcttctcctggctgacagcctggtgctcctctatctatatgggacccgtacacatggactttttaagagactgggaattccagggcccacacctctgcctttgttgggaaatgttttgtcctatcgtcagggtctctggaaatttgacacagagtgctataaaaagtatggaaaaatgtggggaacgtatgaaggtcaactccctgtgctggccatcacagatcccgacgtgatcagaacagtgctagtgaaagaatgttattctgtcttcacaaatcgaaggtctttaagcccagtgggatttatgaaaagtgccatctctttagctgaggatgaagaatggaagagaatacggtcattgctgtctccaaccttcaccagcggaaaactcaaggagatgttccccatcattgcccagtatggagatgtattggtgagaaact

SEQ ID NO: 13185 - DNA, 423 bp, Homo sapiens
gctctgaagccattacaaaggttgcttaacttctaattatttgatcactgaggaaaatccagaaagctacacaacactgaaggggtgaaataaaagtccagcgatccagcgaaagaaaagagaagtgacagaaacaactttacctggactgaagataaaagcacagacaagagaacaatgccctggacatggctccagagatccacatgacaggcccaatgtgcctcattgagaacactaatggggaactggtggcgaatccagaagctctgaaaatcctgtctgccattacacagcctgtggtggtggtggcaattgtgggcctctaccgcacaggaaaatcctacctgatgaacaagctagctgggaagaaaagggctggagtacagtggcaagatctcagctcaccacagtcttgacttc

SEQ ID NO: 13186 - DNA, 70 bp, Homo sapiens
gaatatgcaactaggaaggggcagaatcagaatttaagctttcatattctagccttcagtcttgttcttc

SEQ ID NO: 13187 - DNA, 493 bp, Homo sapiens
acagagggggcccctcgaatggggctggcagcagctggaggagtggagcaccagcaactgttagacctcgcccagaagcacctcggcggcatcccatggacatatgcagaggacgctgtgcccactcttactccatgccgcttcactggcagtgagatccgccaccgtgatgatgctctacgttttgcccacgtggccattgcagtagagggtcctggctgggccagcccggacaatgtggccttgcaagtggccaatgccatcatcggccactatgactgcacttatggtggtggcgtgcacctgtccagcccactggcttcaggtgctgtggccggcggctatgccagagtttccagaccttcagcatctgctatgcagagacgggcttgctgggtgcacactttgtctgtgaccgaatgaaaatcgatgacatgatgttcgtcctgcaagggcagtggatgcgcctgtgtaccagtgccacggagagtga

SEQ ID NO: 13188 - DNA, 653 bp, Homo sapiens
acagaaagggatcccatccattttcaacactccagagccaacaacaacgcaagaacctttggtgggcagccaaaagagaaaagcaaggaaaaccaagattacacaccttgtcaggacagcagatggccgggtatcaccagcaggaggtactttggatgacaaaccaaaggaacaactgcagaggagtctccctaaagcaactgagacagactgcaatgacaaatgctcacacaacaccgaggtcggggagacgcggagcagtactccagaaatgcctgccgtgtctgcgttctttagcctcgctgcgctggctgaagtggcagccatggaaaatgtgcacagaggtcagaggtcaactccgctcacccatgatggacagccaaaagaaatgccgcaggctcctgtacttatttcctgcgctgaccagtgaagcgccctttcattgtaaaacattgtgctttacctactaccctagccttgtctttaccgagggatgctagtgagtccaagtggtggaaaatatagactgcaaacaagtgcttgttgccccacacggcccagattcacttgaagcagaagttagcatcctgggccagtttgttctctcagaacccagaatctttgagggtaaggttatctgtctgatactgagc

SEQ ID NO: 13189 - DNA, 557 bp, Homo sapiens
gctgccttcactaggatattgtgtagaatgtacctgaaacatgggagcccagttaaaatgatggagagttatattgcagttctcacaaaggggatatgccagagtgaagaaaacggctctttccttagtaaggattttgatgcccgaaaggcctacctggctggctccatcaaagacattgtatctcagtttggaatggaaactgttatcttacacacagcactgatgctaaagaaaagaattgtggtgtatcaccccaagatagaagcggtccaggagttcaccaggactctgcctgccctggtgtggcaccgacaggactggaccatccttcactcttacgtgcacctcaacgccgatgagctggaagccctgcagatgtgcacaggttacgtcgctggatttgtagacttggaggtgagcaacagaccagacctctatgatgtgtttgtgaatctggcagagagtgagattaccattgctccccttgcaaaagaggccatggcaatgggcaaactgcacaaagaaatgggtcagctaattgttcagtctgcaga

SEQ ID NO: 13190 - DNA, 348 bp, Homo sapiens
gagctactcgggaggctgaggcgggagagttgcttgaccctgggaggcggaggttgcagtgagccgagatcgtgccactgcactccagcctggccgatagaatgagactctgtctcaaaaaaaaaaaaaaaaaagaattaaaaaaaaaagactaaaaaattgtttgtcaaaattgtaacagtgttttgttttgggaaatgctaaaaatgtgtggggaattaattttttttccaaggccattgggcattttaaaatttttttataatttttttaccttatggtggaaataaaaaagccattaccaatccccattttttttttaaaaggaaaaattttagccaaggggaa

SEQ ID NO: 13191 - DNA, 509 bp, Homo sapiens
gaacatattatcaggaaaaaagatatcattgaaaaaattggaaaagtcaaagtctggccgggtgcagcggctcacatctgtattcccagcattttgggaggccaaggcaggtggatcacttgaggtcagagttcaagaccagccttgccaacatggtgaaacccacctctacttaaaaaaaaatacaaaaaaattagccaggcatggtggcacacacctgtaatctcagctattcaggagactgaggcaggagaatagcttgaaccaaggaggcgtaggttgcagtgagctgagatggagccaccacactccagcctgggcaacagagcaaggctctgtctcagagaaaaaaggccaggcgtgatgggtcatgcctgtagtcccagcactttaggaggctgaggtgggcggatcacctgaggtcgggagttcaagaccagcctgaccaacatggagaaaccctgtccctactaaaaatacaaaattagccgggcgtggtggcacatgcc

SEQ ID NO: 13192 - DNA, 301 bp, Homo sapiens
gaggctataacttgatctaccgatcaacaaggcatctcaagagacttgcgttgatgatacagtcctctggcaacacagtgcttctcctcatactgtgcatgcagcactccttcccagagcctggcagattgtatcttgacctcattctggccatcttggcactggaactcatctgttccctgaatgcctccgatttaacagtgaaaatccccaagatttaataaagctaaaccagagcctgatatacttgaagaagaaaaaatctatgcttaccccagcaatattacctcggagactggat

SEQ ID NO: 13193 - DNA, 521 bp, Homo sapiens
gtgattgttgctcacctgagtgtggctgattgtgtacatccagcagttacaatttttaaaaattatacttttacatttattttatatttttctcacccccagtaatttccttccaaagaagttcacatgtaataagtagaaattctgtataggaaaaaagcattaaaaatactattataactgcttcatttgctgggaaccattaaaagtaatataaattagctttttccagaaggatccttttgtagcagtgtttatgaatgtaacccccagcaaaatatggctatatattaggggagccagtttggagcagaggcctgaaggtccctgctatgcagccgtggccacagctcgcagcccaagcactgtggagcatccacacctttgatggcaatgcagattggtagcaggttccataggcgtacaaaacagtattaaagctcagtgttttgcatattgttagcatttacaaatatttctgctttagtatgaggaaagtaaggatgggcaaagaagtgatc

SEQ ID NO: 13194 - DNA, 596 bp, Homo sapiens
aggggggagttcaggaaatggaaggcgcaatgtttgagcaaagcggacctcagccggaagggcagtgttgacgaggatgtggtagagcttgtgcagtttctgaacatgcgagatcagtttttcaccaccagctcctgcgctggccgcatcctactccttgaccggggtataaatgggggggaggttcagaaacaaaactgttgctggctactggttacacacaaactttgtgtaaaagatgatgtgattgtagctctgaagaaagcaaatggtgatgccactttgaaatttgaaccatttgttcttcatgtgcagtgtcgacaattgcaggatgcacagattctgcattccatggcaatagattctggtttcaggaactctggcataacggtgggaaagagaggaaaaactatgttggctgtccggagtacacatggcttagaagttccattaagccataagggaaaactgatggtgacagaggaatatattgacttcctgttaaatgtggcaaatcaaaaaatggaggaaaacaagaaaagaattgagaggttttacaactgcctacagcatgctttggaaagggaaacgatgac

SEQ ID NO: 13195 - DNA, 535 bp, Homo sapiens
atttattcttgggtggccagttttgaaacctaaaaaggacaataaagcaaaaagtatcagtaaggataggtggctgagacccactgccctgagctactagtgtggctgtgcctgtgggtctctagaaccatctgcattggacgtgaagccacagcaggtggctggactgctggcctgttcctaatgagctacgctgggctttgagtagagttggggtttatgaaccccaactctggcttaaagatcttgctgtggctctgttatgttctgaggccttgggattagcctcttcctcattatggagctgattttctagtctgtggatcagctatgcctttggacacttctcttttccattgtgccttttgaatgttgtcttctcactcagcatcagcacttcgatctaaatgcagactaggtagttgggaggaggaaccaaagtgaaccatccttcatttattcagtcattcgttcatctgtcaaacacgtatttggacatcaaggttgcagagatgaacaatgcatggatttcatc

SEQ ID NO: 13196 - DNA, 521 bp, Homo sapiens
gacagagggggagatgatattcagatattctctcaaaggcaggactccaacaccgcaggtggaaaaccaacaaaaggaagaaaacagaaaggtgggggagataaggagtagccaggaaaaagaaaatagtgataaaggaagagccaaaaaggaggaaagggaagatgaaagaccgacttcaagaactaaagcagagaacaaaggaaattgaactctctagagacagtcatgtatcaactacagaaacagaggaacaaggggtgtttctacagcaagctgttatttatgaaagagagcctgtagctgagagacacctacatgaaatccaaaaactactggaagtattaacaatttggcagataatgttcaaaaatttgggcagcaacagaaaagtctggtggcttcaatgagaaggtttagtctacttaagagagagtctaccattacaaaggagataaaaattcaggcagaatacatcaacagaagtttgaatgatttagttaaagaagttaaaaagtcag

SEQ ID NO: 13197 - DNA, 598 bp, Homo sapiens
gagcttccgggtttcctgggctactacgatggcgatgagtttcgagtggccgtggcagtatcgcttcccacccttctttacgttacaaccgaatgtggacactcggcagaagcagctggccgcctggtgctcgctggtcctgtccttctgccgcctgcacaaacagtccagcatgacggtgatggaagctcaggagagcccgctcttcaacaacgtcaagctacagcgaaagcttcctgtggagtcgatccagattgtattagaggaactgaggaagaaagggaacctcgagtggttggataagagcaagtccagcttcctgatcatgtggcggaggccagaagaatgggggaaactcatctatcagtgggtttccaggagtggccagaacaactccgtctttaccctgtatgaactgactaatggggaagacacagaggatgaggagttccacgggctggatgaagccactctactgcgggctctgcaggccctacagcaggagcacaaggccgagatcatcactgtcagcgatggccgaggcgtcaagttcttctagcagggacctgtctccctttacttcttacctcccaccttt

SEQ ID NO: 13198 - DNA, 331 bp, Homo sapiens
cactgctgtctgtctgttccaccggatctaaccacagcacacgcgtggctcacggtactattgtgataaatgcttgctacatgaaggcgttaacagggatgataatagactttctggagaaacaaaaggactaacaatcacgaaggggaggtgatcggggcatgagtaaagtggacacctcagcaaagccattcgctgtgatctctgattgagcagtgacatgtcctgtcaccagagccccctcgtgtttgatgttggccaatgccgacagcatgatctagcaggccacatcctaatctaccattctctgacaccagctggtcccctgggt

SEQ ID NO: 13199 - DNA, 637 bp, Homo sapiens
  misc_feature 548: n = A,T,C or G
agaaaagcattgatgacttagaagagaaagtggctcatgccaaagaagaaaaccttagtatgcatcagatgctggatcagactttactggagttaaacaacatgtgaaaacctccttagctgcgaccacattctttcattttgttttgttttgttttgtttttaaacacctgcttaccccttaaatgcaatttatttacttttaccactgtcacagaaacatccacaagataccagctaggtcagggggtggggaaaacacatacaaaaaggcaagcccatgtcagggcgatcctggttcaaatgtgccatttcccgggttgatgctgccacactttgtagagagtttagcaacacagtgtgcttagtcagcgtaggaatcctcactaaagcaggagaagttccattcaaagtgccaatgatagagtcaacaggaaggttaatgttggaaacacaatcaggtgtggattggtgctactttgaacaaaaggtccccctgtggtcttttgttcaacattgtacaatgtagaactctgtccaacactaatntattttgtcttgagttttactacaagatgagactatggatcccgcatgcctgaattcactaaagccaagggtctgtaagccacgctgct

SEQ ID NO: 13200 - DNA, 653 bp, Homo sapiens
  misc_feature 567: n = A,T,C or G
cgtcgaccccgcgtccgaagcaccccgcacttctcgaagtctgagttacttggaatcgttttaccacatgatggacagaaggaatatttcagatatctctgaaaacctcaagcgttaccttcttcagtattttaagccagtgattgacaggcaaagctggagtgacaagggctcagtctgggacaggatgctccgctcggctctcttgaagctggcctgtgacctgaaccatgctccttgcatccagaaagctgctgaactcttctcccagtggatggaatccagtggaaaattaaatataccaacagatgttttaaagattgtgtattctgtgggtgctcagacaacagcaggatggaattaccttttagagcaatatgaactgtcaatgtcaagtgctgaacaaaacaaaattctgtatgctttgtcaacgagcaagcatcaggaaaagttactgaagttaattgaactaggaatggaaggaaaggttatcaagacacagaacttggcagctctccttcatgcgattgccagacgtccaaaggggcagcaactagcatgggattntgtaagagaaaattggacccatcttctgaaaaaatttgacttgggctcatatgacataaggatgatcatctctggcacaacagctc

SEQ ID NO: 13201 - DNA, 526 bp, Homo sapiens
tcggcacgaggaaaaagcctgtgatggccgggcatgttggctcacagctgtaatcccaacactgggaagccaaggtgggtggatcacctgaggtcaggagttcgaggccgggctggccaacatggtgaaacctcatctctactaaaaatacaaaaaattagatgggcgtggtggcaggtgcctgtaatcccagctacttgggaggctgaggcaggagaatcgcttgaacccaggaagtggaggttgcagtgagcacgatcgtgccattgcactccagcctgagcaacaagagtgaaactctgtctcaaagaaaaaacaacaacaaaactgtgattctccatctaactttttacaattatcctttcacaattcaagaaagtgtgaatgcaagtcattactaacagtatctcagtaaaagtagtccaggagcaaatattttctttttaactgggttcccagctagttccattcccttgaattcagtggcaaagtcactgtcaataaaaggtttttactcttcttcctt

SEQ ID NO: 13202 - DNA, 566 bp, Homo sapiens
ttcggcacgaggggctcggccagcgagtacgactacgtgagcttccagtcggacatcggcccgtaccagagcgggcgcttctacaccaagccacctcagtgcgtggacatccccgcggacctgcggctgtgccacaacgtgggctacaagaagatggtgctgcccaacctgctggagcacgagaccatggcggaggtgaagcagcaggccagcagctgggtgcccctgctcaacaagaactgccacgccggcacccaggtcttcctctgctcgctcttcgcgcccgtctgcctggaccggcccatctacccgtgtcgctggctctgcgaggccgtgcgcgactcgtgcgagccggtcatgcagttcttcggcttctactggcccgagatgcttaagtgtgacaagttccccgagggggacgtctgcatcgccatgacgccgcccaatgccaccgaagcctccaagccccaaggcacaacggtgtgtcctccctgtgacaacgagttgaaatctgaggccatcattgaacatctctgtgccagcgagtttgcactgaggatgaaaat

SEQ ID NO: 13203 - DNA, 487 bp, Homo sapiens
catttgattcttctgccagttttattattgttattatgctcattaatattaatactcagccactgtacctatttaagattgaagaggagaaaggcaaggttttgctgaaatcatgatagcagtgacaatgggtttggggcaggtgggcatgaggggcttgaaggctccttgaagcgaccttcctagttataatatttgaaaatgtagaataatttatgggtcagattgccaatggttccttctcctttctaaaaaccaattctgaatttgcttcaccatatttttgatgatgtgttttatggcctcacaaactcccagctggttccctcgatgatctcgtctctgtggttactgtcaacaatccacattcgtgttgtggcatatcatcttacagaagcatttaaagcagctcagggcttctttcctctgatgtagattttctccattgttactcaacgaggctctgacatcagcctcctttcagttc

SEQ ID NO: 13204 - DNA, 423 bp, Homo sapiens
ttacctgtgtgtgtagatgtgtgtgtttctttcttgctttttgtctgagtgcttttgtttctgtcagatgagccacatattcatatacatatacatgaggatgcatatacacttgtgttagaaatcatgaatttacaccaatgaatatgtttaattccagtccattccacagggtttcttcttctctccttcagtctttatttactcccttttacaacctgtctctgaaaaaatatctttacattaacccagaggtcaatcctataataataacagtttcagaatttctttagaagtacgtgcattttttattgtccttagttatggctagaagattatgaactacaaccattatctttcggcttaccaatataaaaagcaaggggagataaagcatttccccttctgtgtctcaccttttct

SEQ ID NO: 13205 - DNA, 525 bp, Homo sapiens
caacttccttcggtcgtcccgaatccgggttcatccgacaccagccgcctccaccatgccgccgaagttcgaccccaacgagatcaaagtcgtatacctgaggtgcaccggaggtgaggtcggtgccacttggtgccctggcccccaagatcggccccctgggtctgtctccaaaaaaagttggtgatgacattgccaaggcaacgggtgactggaagggcctgaggattacagtgaaactgaccattcagaacagacaggcccagattgaggtggtgccttctgcctctgccccgatcatcaaagccctcaaggaaccaccaagagacagaaagaaacagaaaaacattaaacacagtgggaatatcacttttgatgagattgtcaacattgctcgacagatgcggcaccgatccttagccagagaactctctggaaccattaaagagatcctggggactgcccagtcagtgggctgtaatgttgatggccgccatcctcatgacatcatcgatgacatcaaca

SEQ ID NO: 13206 - DNA, 436 bp, Homo sapiens
agcctggccagtggtgtgagctgagtgtctgcatccagacggccagttgcttggtctaggatggggggcaggaggttagtgtggagggagccccagcgtgagaaattgagggagcaactttgtctctgaaactcaagagggtggaggcaagacttctatttttgttgacaggtgccccaagtttcagccctgaaccctgacatatcttccttctcccaagtcctttttcttatttttcttgttttgtattgttttgttttggtttggtttcttttgagatggagtctcactctgtcacccaggctggagtgcagtggcaccgtctcagctcactgcaacctccaccttccaggctcaagcgattctcctgcctcagcctcccaggtagctgggtttacaggcacacgccaccacacccagctaatttttgtatttt

SEQ ID NO: 13207 - DNA, 50 bp, Homo sapiens
gacagaagggtacggctgcgagaagacgacccaagggtacggctgcgaga

SEQ ID NO: 13208 - DNA, 527 bp, Homo sapiens
atctacaaaattctggatactggatctcggtgcaaaacgataataataatacctgctttatataattctaggaaagaagtgtgtacatgaagaatgtgatttctacccataagaaactgaatctaggccatagtgatatattttagaatgtaggtttgttgttcataggtacaggttgtgaacgaaattattataaggactcaggagataattctagtgcagaagaaaaggtcaaatcttcaaaggaagcatattagttcctaagccacagaattctcagtgtgtaccactcttgttcaaagtgtctaaatatttccacaatcataaatttatttgtgggtgtccaccttttgcatctggatattaaatttacacatggcttttatagctggaatgaaatccagatttttttccagtgataccatataaagtcttaaaaaatattgatttccttctttttggggggtggtcagacctggatgaaagcatattgctcctattgctagagaaataatccattatgtgtt

SEQ ID NO: 13209 - DNA, 451 bp, Homo sapiens
gacagaagggagaagtggcaagagggattaaaagatgatgagaagcttgaggtttctgaattagcaactgcgaaacgtcctcaggagagaagctacatgctgcagaggtggcaagaagatggtggtgttatgatcataggctatgagatgtatagaaatcttgctcaaggaaggaatgtgaagagtcggaaacttaaagaaatatttaacaaagctttggttgatccaggccctgattttgttgtttgtgatgaaggccatattctaaaaaatgaagcatctgctgtttctaaagctatgaattctatacgatcaaggaggaggattattttaacaggaacaccacttcaaaataacctaattgagtatcattgtatggttaattttatcaaggaaaatttacttggatccattaaggagttcaggaatagatttataaatccaattcaaa

SEQ ID NO: 13210 - DNA, 655 bp, Homo sapiens
acagaaggggacacagggccgctcagaggccgccgcaatgctcccctctttgcaggagtcgatggatggagatgaaaaggaactagagagcagcgaagagggaggctcagccgaggagcggagactcgagccgccgtccagcagccactactgtctttacagctatcgcggaagcagattggcacagcaacgaggggacagtgaggacggaagcccaagtggcacaaatgcagaaactccctctggtgatgatttcagcctctccttggcagatactaatctaccatccgaagtggagccagagctgcgcagtttcattgctaagcgtctttcaagaggtgcagtctttgaagggctgggtaatgttgcatctgtggagctaaaaattccaggttaccgagttggttgttattactgccttttccaaaatgaaaaactgcttcctgaaacagtaacgatagactctgaacgtaacccttcagaatatgtggtctgttttttaggagggtctgaaaaaggacttgagcttttcaggcttgaattggacaagtacattcaagggctgaaaaaaacatgaattgtgaggcaaggggcctggagagtcacataaaatcctatctgagcagctggtttgaggatgttgtatgcccaatcc

SEQ ID NO: 13211 - DNA, 505 bp, Homo sapiens
gacttggagagtcattcaacagaggccgtgttgggggatgctttggtagatttctccctgaagctctaccacgccttctcagcaatgaagaaggtggagaccaacatggccttttccccattcagcatcgccagcctccttacccaggtcctgctcggggctggggagaacaccaaaacaaacctggagagcatcctctcttaccccaaggacttcacctgtgtccaccaggccctgaagggcttcacgaccaaaggtgtcacctcagtctctcagatcttccacagcccagacctggccataagggacacctttgtgaatgcctctcggaccctgtacagcagcagccccagagtcctaagcaacaacagtgacgccaacttggagctcatcaacacctgggtggccaagaacaccaacaacaagatcagccggctgctagacagtctgccctccgatacccgccttgtcctcctcaatgctatctacctgagtgccaagtgga

SEQ ID NO: 13212 - DNA, 644 bp, Homo sapiens
acagaaggggcgcgggctcgcgcttcggtttccccagacctgctcgcagcaccctgctgtcttcccggtccggcccgctgcccgcggcgccagcaccatgctcttctattcttttttcaagtcccttgtgggcaaggatgtggtcgtggaactaaagaatgacctgagcatctgtggaaccctccattctgtggatcagtatctcaacatcaaactaactgacatcagtgtcacagaccctgagaaataccctcacatgttatcagtgaagaactgcttcattcggggctcagtggtccgatacgtgcagctgccagcagatgaggtcgacacacagttgctacaggatgcggcaaggaaggaagccctgcagcagaaacagtgatggctcctcctcctcttcccctccctctttcattggtgacccataaccccaagtcccagcccagaacccctaacccccaatacttgaaggggttttgtttttttactaatgatggttttgtgggttttttttaagggatgagtggatgagaggagtaatagggaacagctatcctctcttgagaaggggaggataagtaggctgggaaacttcaaagccttcccagtccccagcacctgcctttctcactacttctctg

SEQ ID NO: 13213 - DNA, 599 bp, Homo sapiens
ggcttttggttcttacagtagtcggcgtaggccttaggtgggttcgtgcgccttctacctcgctgtttcggttttcctggctcctcggcccttttctcccctgttgcagctgggagcggacgaagcgcgaagctgggattttttactgtctcctgaagaatttaacacaaacatggatatcagaccaaatcatacaatttatatcaacaatatgaatgacaaaattaaaaaggaagaattgaagagatccctatatgccctgttttctcagtttggtcatgtggtggacattgtggctttaaagaccatgaagatgagggggcaggcctttgtcatatttaaggaactgggctcatccacaaatgccttgagacagctacaaggatttccattttatggtaaaccaatgcgaatacagtatgcaaaaacagattcggatataatatcaaaaatgcgtggaacttttgctgacaaagaaaagaaaaaagaaaagaaaaaagccaaaactgtggaacagactgcaacaaccacaaacaaaaagcctggccagggaactccaaattcagctaatacccaaggaaattcaacaccaaatcctc

SEQ ID NO: 13214 - DNA, 544 bp, Homo sapiens
ggcccgctccggggatgatgtgctggtactgctttgtgggccacccccaatggtgcagctggcctgccatcccaacttggacaaactgggctactcacaaaagatgcgattcacctactgagcatcctccagcttccctggtgctgttcgctgcagttgttccccatcagtactcaagcactataagccttagattcctttcctcagagtttcaggttttttcagttacatctagagctgaaatctggatagtacctgcaggaacaatattcctgtagccatggaagagggccaaggctcagtcactccttggatggcctcctaaatctccccgtggcaacaggtccaggagaggcccatggagcagtctcttccatggagtaagaaggaagggagcatgtacgcttggtccaagattggctagttccttgatagcatcttactctcaccttctttgtgtctgtgatgaaaggaacagtctgtgcaatgggttttacttaaacttcactgttcaacctatgagcaaatctgtatgtgtgagtat

SEQ ID NO: 13215 - DNA, 589 bp, Homo sapiens
  misc_feature 437: n = A,T,C or G
gattatcccatctaacagcagaaggccaagccacactggagagattagaaggaatgctttctcagtctgtgagcagccagtataatatggctggggtcaggacagaagattcaataagagattatgaagatgggatggaggtggataccacaccaacagttgctggacagtttgaggatgcagatgttgatcactgaaaatgatttatgcaagtttaagattctgctcctaagtgtaggagagaacttggtgcctcttccactctggagtgaagttaatgaaagtctttttccttttccaaaacccaacctgaaccagttctttcttgagacagactatactgagacaacaagttgtcaccagcagaagatagataatatgacctttattaacttgatgaattaacttaaccaagagggtatttgtagtttactatntaccctaaaactttctgtgtctgggtaccctctgagtaggcctataattcctaccttgactgtgtgcatcatttgtaagctagcagatctatgtggtgaaaatgcacaggagcttggtagactgcgggggaaagagagagctcctttcgcca

SEQ ID NO: 13216 - DNA, 544 bp, Homo sapiens
gttccagaggcaattcaaggcggaacatttggtttcaattcatctgccaatgtaccaacagaagggttccagttttagaaagatgttgtggaagttaggtacaatgcagcactgagatatatatatatatatgtgtgtgtgtatatatatatatatacatatatataaaaaggtttgatccatcaagcttggctcatgggatctgctgctgcattaaatcgggaaagaaaatgtgaagatttcatttggaatcacagaaaatgcccaaatgaggtcaagatggcgagtgggtgcgagtgagaatagtggcaaaatgtaatgaaaactttacatgagtgcttatttaggttgttcaaagtaaaaagggctacaggtcacagatcgtcagtgcctgagaaagaacattgactcactctatatcaattgaggggaaagtgcagtaccgtcatcttcaagccttgtaagcataaaagagaatacgctgcccatataagtcaaaggaaaatgagcccacgccttgctatgaaacagtgtgtgaatggac

SEQ ID NO: 13217 - DNA, 121 bp, Homo sapiens
gacagaagggggggcgcccagctgccaacaccaagattggcccccgccgcatccacacagtccgtgtgcggagaggtaacaagaaataccgtgccctgaggttggacgtggggaatttctc

SEQ ID NO: 13218 - DNA, 580 bp, Homo sapiens
acagaagggctctctttccttgcctaacgcagccatggctcgtggtcccaagaagcatctgaagcgggtggcagctccaaagcattggatgctggataaattgaccggtgtgtttgctcctcgtccatccaccggtccccacaagttgagagagtgtctccccctcatcattttcctgaggaacagacttaagtatgccctgacaggagatgaagtaaagaagatttgcatgcagcggttcattaaaatcgatggcaaggtccgaactgatataacctaccctgctggattcatggatgtcatcagcattgacaagacgggagagaatttccgtctgatctatgacaccaagggtcgctttgctgtacatcgtattatacctgaggaggccaagtacaagttgtgcaaagtgagaaagatctttgtgggcacaaaaggaatccctcatctggtgactcatgatgcccgcaccatccgctaccccgatcccctcatcaaggtgaatgataccattcagattgatttagagactggcaagattactgatttcatcaagttcgacactggtaacctgtgtatg

SEQ ID NO: 13219 - DNA, 475 bp, Homo sapiens
acagagggggggtaacgagctatttacttcctgcgggtgcacaggctgtggtcgtctatctccctgttgttcttcccatcggcgaagatggccctggagacggtgccgaaggacctgcggcatctgcgggcctgtttgctgtgttcgctggtcaaggtactatagaccagtttgaatatgatggttgtgacaattgtgatgcatatctacaaatgaagggtaaccgagagatggtatatgactgcactagctcttcctttgatggaatcattgcgatgatgagtccagaggacagctgggtctccaagtggcagcgagtcagtaactttaagccaggtgtatatgcggtgtcagtcactggtcgcctgccccaaggaatcgtgcgggagctgaaaagtcgaggagtggcctacaaatccagagacacagctataaagacctagcaagatgcgaggctgccagcatctttgctctc

SEQ ID NO: 13220 - DNA, 588 bp, Homo sapiens
gacagaaggggaagggtctatgaccaaagaagaatttgccaagatgaaacaagaactggaagctgagtatctcgctgtgtttaagaagactgtgtcctcccatgaagtctttcttcagcggctttcttctcaccctgttctcagtaaagatcgcaactttcatgttttcctggaatatgatcaggatctaagtgttaggcggaaaaatactaaagagatgtttggtggcttcttcaaaagtgtggtgaaaagtgctgatgaagtcctttttactggagttaaggaggtagatgacttctttgagcaagagaagaacttccttattaactattacaataggatcaaagattcttgtgtgaaagctgacaaaatgaccagatctcataaaaatgttgccgatgactatatccacaccgcagcctgcttacatagcctggctttagaagagcccacagtcatcaaaaagtacctattgaaggttgctgagctatttgaaaaactaaggaaagtagagggtcgagtttcatcagatgaagatttgaagctaacagagctcctccgatactacatgctcaacattgaagctgc

SEQ ID NO: 13221 - DNA, 583 bp, Homo sapiens
ggcgcggcggctgtacaactcggccgttgtcaccatgccggtcgtccggaagattttccgtcgccgccggggcgactcggagtcagaggaagatgagcaggactcagaggaggttcgattaaaactggaagagaccagagaagtacagaacttgaggaagaggcccaacggggtgagtgctgtggccttgctggtgggagagaaggtacaagaggagaccactctagtggatgatccctttcagatgaagacaggtggtatggtggatatgaagaaactgaaggaaaggggcaaagataagatcagtgaggaggaggacctgcacctggggacatcgttttctgcagaaaccaaccgaagggatgaggatgcagacatgatgaagtacattgagacagagctaaagaagaggaaagggatcgtggaacatgaggaacagaaagttaagccaaagaatgcagaggactgtctttatgaacttccagaaaacatccgtgtttcctcagcaaagaagaccgaggagatgctttccaaccagatgctgagtggcattcctgaggtggacctgggcatcgatgctaaa

SEQ ID NO: 13222 - DNA, 406 bp, Homo sapiens
gaccggaaaactctgaggacatgaatagtcgccaggcttggcggctctttctctcccaaggcagaagagatcgttgggtttcaaggccccgcgggcatttctcgccggccctgcggagagagttcttcactaccacaaccaaggagggatatgataggcggccagtggatataactcctttagaacaaaggaaattaacttttgatacccatgcattggttcaggacttggaaactcatggatttgacaaaacacaagcagaaacaattgtatcagcgttaactgctttatcaaatgtcagcctggatactatctataaagagatggtcactcaagctcaacaggaaataacagtacaacagctaatggctcatttggatgctatcaggaaagacatggtcatcct

SEQ ID NO: 13223 - DNA, 610 bp, Homo sapiens
aactttctgctgtcttgggtgcattggagccttgccttgctgctctacctccaccatgccaagtggtcccaggctgcacccatggcagaaggaggagggcagaatcatcacgaagtggtgaagttcatggatgtctatcagcgcagctactgccatccaatcgagaccctggtggacatcttccaggagtaccctgatgagatcgagtacatcttcaagccatcctgtgtgcccctgatgcgatgcgggggctgctgcaatgacgagggcctggagtgtgtgcccactgaggagtccaacatcaccatgcagattatgcggatcaaacctcaccaaggccagcacataggagagatgagcttcctacagcacaacaaatgtgaatgcagaccaaagaaagatagagcaagacaagaaaatccctgtgggccttgctcagagcggagaaagcatttgtttgtacaagatccgcagacgtgtaaatgttcctgcaaaaacacagactcgcgttgcaaggcgaggcagcttgagttaaacgaacgtacttgcagatgtgacaagccgaggcggtgaaagggcgaattcgtttaaacctgcaggactagtccct

SEQ ID NO: 13224 - DNA, 123 bp, Homo sapiens
gtgttgttctagagcctttattttctacagggcgtttgggctggggaagggtcctgtacatttgcaacaggaggtgtagaatgaaccctgcattgaatgtgtaagcatccaaagctgtcactg

SEQ ID NO: 13225 - DNA, 476 bp, Homo sapiens
ggcatttttcctctttgaccactaaccatgtgaaattctcatattgacctttataatgatcatgaactcttagtatcattgggaaggccacatttgccacttatgattgtaaaccttatcctccatttttcctgttattgttggtgcaaaaagcacctattataccaggactttaaaaatcagtctgataagtctttgataagtctaataataataactgataagtccattgaatttgcttctgattactttttctttagtagctaaacatgtatgtactcctatgattacaatgaacactcctctccatttaaattaattatttacattgatgaaatagcaaaatgttaatgactaaatactgtcttggttttttcgttccaggtcagtcaatattaacttcttataattttcttttttttctttatgtgtgtgtgtgtgtgtattttttttttttaatttcaatggcttttggg

SEQ ID NO: 13226 - DNA, 163 bp, Homo sapiens; identical to SEQ ID NO: 2452

SEQ ID NO: 13227 - DNA, 520 bp, Homo sapiens
acagaagggctctcacctgtcattcttctgagggtctcagtacaagggccctgggatggagccaacctgggtattcacaacaggcctgacttgatactaagtgattagttttccaagttgtcccactgccattcaaagtcagcccttgagtgtatttgttctcagtcctaaccctggggccagagattggtccgaggttgagaattccttcctcctcatccttggtgttgctttctccaaatgattgttttagactagccaaaaatgccgtggcaaagagctcagaaatccaatttggataccaaaggtttctcatgttaatttctcagcccccaaagaagcatcttactcctgaaccttagacaggaagtattgtttcagtcacagaaagcttttctgggtacctctggttagcactttctactctctgatatttcctatgtacatagcttttattgttgtaaatcctttcttaatggttaaataggattgttagcaactatgggtttgcagttttctg

SEQ ID NO: 13228 - DNA, 581 bp, Homo sapiens
atccacataagctaggctttccgcttttgccacggacagtgtgaccaagatatttccagagtaaataacccaccacaaccttggtaattcctcttttcttcttaagctccaggaagcgaaagcagaaggactcttttcagactgccctctgtagcctacattgcagctttccaaaacaggcagctagcactgggaaagcccatgtggtgaccccatatttttctgaggttcttcttttccatggtgttactttattatcagaaagtaaattcagaaaacaggtcttgcccttagcagacaagaaccacaccagtttcttgtaaaggtgacgtatacattgggattcaggagtgacacagaggtccagccccagaacttgtaaggattttgtttgaacactgagcagatgcctcctccctgccacccatcacactagttagggctggccatgaattctatgccagagtcactcctgcagtctgctagggatgggccttcttatcccactctcgcacacatcccagtctagtctttgccttcacagagtcctccttgacacccctgacttaatgatagttgct

SEQ ID NO: 13229 - DNA, 87 bp, Homo sapiens
tataacatctgaagcaagtgaaaggtgccatcaagagaaacggaaaacaatcaatggagaagatattctctttgctatgtctacttt

SEQ ID NO: 13230 - DNA, 527 bp, Homo sapiens
agatgactggtggagtatacaggtgtgaatatagaggaaagtaaactgagaaagtaggaataagtatgatcttggatgtggaaactcagagtaagaattaaattctggctgtactgatctcaggaatgtagagacctcagaatatggagaatgtctgtctcatttaggggaataaacaaatactaatgaaatttgaaattggtagagaaaatgttatatttcaaattttaatttataaactttaattcttcttttagatctactggtatcgacaaggagacttagaaccgaaatttagaaagctaatttactatatcatattttctatcatcatgttgtgtatatgtgcaaacctgtacttccatgatgtgggaaggtgaggctgccaaggagaagtacttaccaggactcttcaaaatgatacattaggacagtgagtaatttttggataaggtatgctgaagaatctcctgcagaagtctgatacatgattttcatgttaattgtaaatgttaattccctcttgc

SEQ ID NO: 13231 - DNA, 644 bp, Homo sapiens
ggttgcgtcccatatctggacccagaagggacttccctgctcggctggctctcggtttctctgctttcctccggagaaataacagcgtcttccgcgccgcgcatggagcctcccggccgccgcgagtgtccctttccttcctggcgctttcctgggttgcttctggcggccatggtgttgctgctgtactccttctccgatgcctgtgaggagccaccaacatttgaatctatggagctcattggtaaaccaaaaccctactatgagattggtgaacgagtagattataagtgtaaaaaaggatacttctatatacctcctcttgccacccatactatttgtgatcggaatcatacatggctacctgtctcagatgacgcctgttatagagaaacatgtccatatatacgggatcctttaaatggccaagcagtccctgcaaatgggacttacgagtttggttatcagatgcactttatttgtaatgagggttattacttaattggtgaagaaattctatattgtgaacttaaaggatcagtagcaatttggagcggtaagcccccaatatgtgaaaaggttttgtgtacaccacctccaaaaataaaaaatggaaaacacacctttagtgaagtagaagtatt

SEQ ID NO: 13232 - DNA, 258 bp, Homo sapiens
gtaacaaactacagaaagtgaaattgcagataaaggggattactgctcctctgctctaaaattggtgtttgggtgatcagaagcaggtagccaatgggaagagcacttctgagtgataactaaagcagtttggtggccttttcacattctccaatgttcaaacatattttccactttccattttctctttcacctcattttgcctctctatcccccatccctgcttatttcttaagcccattgatggcactcattaaa

SEQ ID NO: 13233 - DNA, 361 bp, Homo sapiens
ggttttttttttgagggggagtcttgctctgtcacccaggctggagtgctggggggcaatctcggttcactgcaacctttgtttcccgggttcaaccttttctcctgtctcaccctccccattacctgggattacaggcacccaccaccatgcccagctaattgttgtatgttaagtaaaaacagggtttcaccatgttggccaggctgggctcaaactcctggacctcaagtgatctacccgccttggcctcccaaagtgctggctttacaggtgtgacccaccgtgcccggccaccaaaatcctttggtatacccaacccttttggttaccgcctcatgaaaaatatgcttcccgcatt

SEQ ID NO: 13234 - DNA, 459 bp, Homo sapiens
ggaccattaaatgaaataaccaaaaggctgaagatgatagaaaaatagaaatgaaggtacatatgcacacaaaatttgcctcatttgtttgctgacatttatttttcatcattgcaaccattgccatgaagaacatgaccatggccctgaagcgcttcacagacagcatcgtggaatgacagaattggagccaagcaaattttcaaagcaagctgctgaaaatgaaaaaaaatactatattgaaaaactttttgagcgttatggtgaaaatggaagattatccttttttggtttggagaaacttttaacaaacttgggccttggagagagaaaagtagttgagattaatcatgaggatcttggccacgatcatgtttctcatttaaatattttggcagttcaagaaggaaagcattttcactcacataaccaccagcattcccataatcatttaaattc

SEQ ID NO: 13235 - DNA, 566 bp, Homo sapiens
gaagaaggggagcaagtgagcagatcctccgaggcaccagggactccagcccatgccatggcggattctgagcgcctctcggctcctggctgctgggccgcctgcaccaacttctcgcgcactcgaaagggaatcctcctgtttgctgagattatattatgcctggtgatcctgatctgcttcagtgcctccacaccaggctactcctccctgtcggtgattgagatgatccttgctgctattttctttgttgtctacatgtgtgacctgcacaccaagataccattcatcaactggccctggagtgatttcttccgaaccctcatagcggcaatcctctacctgatcacctccattgttgtccttgttgagagaggaaaccactccaaaatcgtcgcaggggtactgggcctaatcgctacgtgcctctttggctatgatgcctatgtcaccttccccgttcggcagccaagacatacagcagcccccactgaccccgcagatggcccggtgtaggcgaacttccctcatttctctctgcaatctgcaaataactcctccattga

SEQ ID NO: 13236 - DNA, 554 bp, Homo sapiens
agtcattttcatgatcacaaaatttgtccaggatagacatagagctagaagaaacagacttcgtaaagatcaacttaagaaacttcctgtacataaattcaagaaaggagatgagtatgatgtatgtgccatttgtttggatgagtatgaagatggagacaaactcagaatccttccctgttcccatgcttatcattgcaagtgtgtagacccttggctaactaaaaccaaaaaaacctgtccagtgtgcaagcaaaaagttgttccttctcaaggcgattcagactctgacacagacagtagtcaagaagaaaatgaagtgacagaacatacccctttactgagacctttagcttctgtcagtgcccagtcatttggggctttatcggaatcccgctcacatcagaacatgacagaatcttcagactatgaggaagacgacaatgaagatactgacagtagtgatgcagaaaatgaaattaatgaacatgatgtcgtggtccagttgcagcctaatggtgaacgggattacaacatagcaaatactgtttgac

SEQ ID NO: 13237 - DNA, 617 bp, Homo sapiens; identical to SEQ ID NO: 2481

SEQ ID NO: 13238 - DNA, 562 bp, Homo sapiens
caaagtggtcgactagtaatttaataacctgctagaagaaaaatgcattgcattagagaaagataaccaaacccagagtttgtataaatatcatgcacaatgttcaactgtaattcaaaaattaccagtgatggatacagaaaaatgtgacatgtaatttttttttaaagtccatggaaatagattcctcgatgattcagaagttgtagacaaggactttaaagcagaaattataaatatattcaggattttaaaaaaatatgttttcaggcccggtgcggtagttcacgcctataatccaccagatgtggtggcgtatgcttataatcccagctactcagaaggctgaggcatgagaatagatagcttgaacccaggaggtggaggttgcagtgagccgagattgctccactgcactctagcctgggcaacagagtgagaccctgtctctaaaaatatatgtatatatatagtcataatgagggaacagatgagaaaataagcagagaaatgaaaattttcaaaaataagtaaaaagttaaggtataatacctgaaatttt

SEQ ID NO: 13239 - DNA, 508 bp, Homo sapiens
tgatagtttgatctagaaaccagcagctactggttcaaattcaggttctggcgtcaaatagcgacatttccagtttctcttaaaaaccgtgtttggtttcagttgggataggcttgttttgtctgttgaaaatgttgctaggtttttttctttcatttttctctcattccatttctgccttaactttagtttgttcacagggaggcaaagctgacatgaaccttttgtcgtgggacttcaggccacattggcttgaaggcattcgtttccttctggggtgggaacaggccctcatggcaggcttgttcccgtggctctgagcgaggcctcttcctgctgggctcccagactcctgcatccaggcccccaccttctcggcttctggtttttctttctttttggtagaacacaacatctaccattcagttaaaccttctttatctcctcctttggcatccatttttccaaagaagagtcgagtcctctgaggtctgtgcttgaaagccgt

SEQ ID NO: 13240 - DNA, 612 bp, Homo sapiens
gacagaaggatgaccagaacatcacacctttgcacacggacttctctgggagcagcactgaaagaatttgaaactgacttttggagctttccttcttttttcatttcaactgaaaatgctttaggtaaaaacctttccagtatgttcacctctagaatagccacccaaagaccttcctgaggctgcctcagaagcaccacttgctgttttgaatgactctactagtatgagaaggatgtgaaggtggttggctggttgggctttaacttcctgggattcataatttttaagcttggaagatagctgctgttcccatgatgggcacatttcctgagaagcttgaatgactgatgagcatagagcacccctgccttcctcaggaaacctgaccggcaggggctctctggcttcctgaaagcttcacctcttccctcgtttatatctcaactgtaagggcattttcaagcttctgttcatggaatgagcaactcagactgtctggagcttgctgagtacaaacacaccaccactaagtttcagaactttccttagaacttgggcaaaatgtggtggtaactcttaagtgcttttggtatctcttgagattctaac

SEQ ID NO: 13241 - DNA, 359 bp, Homo sapiens
tgtttgcgtctggggtgtgttatcaaacagagcatggtctacatcccactgtgtcaaccagaagagccaagtgttatctcaattggcccagtgtttctccaggctggggactgttaagggctctaagggaatgtagacagagtctccctgttattctgacttcctgcttgatgagctttcagttcctgtttttgctattgtttcctaaatttgacctacatattacatgggtgtagtgtgttgaggcttttcaaagaagggtctagtgagctaagttccatcttctggtactcattgatcaaactgacctttctattctcataagcgtttctacccaaagttgtgtgtggaaggagtgt

SEQ ID NO: 13242 - DNA, 545 bp, Homo sapiens
acacttgccaagcacatcatgtctgaacctgaagaaatcactactatgtctggacagaagttaccactgaaaatgtctgttgattacatttctttctcagctcacacggattaccagcaaaccagtgaatttattcgtgctttgaaaccgcctcatgtgattttagtccatggagaacagaatgaaatggccagattgaaagcagcactgattcgagaatatgaagataacgatgaagttcacatagaggttcataatcctcggaatacagaagcagtgaccttaaacttcagaggagaaaaactagccaaggttatgggatttttagcagacaaaaaaccagaacaaggccagcgggtctcaggaatacttgttaaaagaaactttaattatcacatactttctccttgcgacctgtccaattatactgacctggccatgagcacggtgaagcagacccaagccattccatatactggtccctttaatttgctctgttaccagctgcagaaattgacaggtgatgtggaagaattagaaattca

SEQ ID NO: 13243 - DNA, 558 bp, Homo sapiens
acagaagggagaggcgttggcggcgtgaggctcaggactgtacatcagaggaagccaaaagccagctggaatacttcctgaatacagttttaatcttgtttgcaattatttcgaaggggagaaatcatctggatcagaattaagatgctctggtttcaaggaaatagcatgcaacttgccagatcctcctttggactcttcttgagaaattgctctgcctctaagacaactctgcctgtgttgaccttattcacaaaggtacaaagtgaaaaagtaaaattgttgggtgaagaaagttgtacatttaagaaaaagggacaaagttgaaaggaaaggcaatggaataagctttcttcagacctgctcttcaatttttctatcagcacaacagcagcaactcagttttctacccagataccttattatctcccaattagcaaagagtaaattgatgtatttaatggtcatctggcccctacattgaaaaaaatgaagtataggttataatatggtgtttaaaaatgtatcatttagaaatacaatcaattatttttattt

SEQ ID NO: 13244 - DNA, 532 bp, Homo sapiens
caggcaaagcctacaacgctgagacaatcccctaacaacatggtagtaactaaggaaacttttatactaggcttcttagttttaaaaggaagtggcatcattgtttcagttctagtttgtatttttctctcagatatttttcttctttaaaaatctttcccagaagttggttcctagaaaactcaataccatcatctcttatctctatacagggactaggtaataaaaccttcaaaggttgtcaaaggtcatcaagcagtgttcatttatcctgtcacatgtttctgtttctatagtaatttagaaattgcaaatagttaacttttcatcatgtaaaaagttaacattatcctatttccatagataccatggacggcggtgtggcctgagttgtcagtctttaatcctgagtcatgtggctctcttttcatctttgatgtcagttccaattatttggcatcaaaaaccttcatggtaggtagagttttaggtaaaagtggatctagggttactttctttattaacatttcct

SEQ ID NO: 13245 - DNA, 55 bp, Homo sapiens
ggtccttccatctctggggcccactctcttctgtcttcccatgggaagtgccact

SEQ ID NO: 13246 - DNA, 407 bp, Homo sapiens
ctgtgtggctgaaaagtgaaggcaagagctgatttggcctctgtgctcccctccgcaaggggatcgttttctccagaagagctggatattctttcgcccagttatggcagacaagttaacgagaattgctattgtcaaccatgacaaatgtaaacctaagaaatgtcgacaggaatgcaaaaagagttgtcctgtagttcgaatgggaaaattatgcatagaggttacaccccagagcaaaatagcatggatttccgaaactctttgtattggttgtggtatctgtattaagaaatgcccctttggcgccttatcaattgtcaatctaccaagcaacttggaaaaagaaaccacacatcgatattgtgccaatgccttcaaacttcacaggttgcctatccctcgtc

SEQ ID NO: 13247 - DNA, 577 bp, Homo sapiens
gacagaggggagagctgcaggccacagtcccgggcctctggaagctgtcactgcctctgaaatccttgcagaaggctttcagccttacaaggcctgtgggtgagaccttgccccagaccatgggctccttcagcctcactcttcctggtatctctgggctgggcacagaggaacatcagggtgaacgaatgaatgaacagacaatgcacacatcactgggtgatcttggagaaggtgcctctgctccctcacatgatctgtgacacccagatttggcaaggcccatagcagtgagtgttgtataagttttgccatcctggtcctgaagcagggcccagcttggtgctgtgagaaacagcccacctttttgttacctcctgtgtctctatgaaggaggactggaagaaaccctactgacagggcctatcatcttaaaggaatattttgggctgggcgcggtggctcatgcctataatcccagcactttgggaagccgaggcaggcggatcatctgaggtcagtagttcaagaccagcctggccaacatggtgacaacccgtctctacttaaaaaatac

SEQ ID NO: 13248 - DNA, 157 bp, Homo sapiens
atcatatgttgactgcagttatgaatattcatgtacatgtctcctggaacacttgagcaagacttactcctggatatttgcccaaaaatggaactgctgggttttaaggtatgtaaatgttcaatttgacaagataatgataatttttggctgggcg

SEQ ID NO: 13249 - DNA, 567 bp, Homo sapiens
aatatatcgtatcagttagggtggggcgggaacaaatcacaatggtagaatgtcatcaggtaagactattttcgcttcttttttggatcttcagttgcttcaggccatcttcatgtatatgtgcaggcccacaggggatatgatggcttagcttgggctcggaggcccgacactgggatgtgtaaccattattctagatggctatgctaaacccagcataatcagaggttccattttgttgagaaagaaagggacaacgaatattgggcaacaatttgtcatctctgccactgaaaccactgcttctctgtccactacattttatcaaaggcagagtgtcttgcaatcagcttgacttgcaagaggctcaaaggcctcttggaatgccttgcatcagcttgcttttgtggcataaaaagttaccccaggtgggcgcagtggctcacccctgcctgtaatcccagcactttgggaggctgaggcgggtggatcacttgaggccaggagttcaagaccagcctggtcagcatagtgaaaccccatctctactgaaaacacacaaaaagt

SEQ ID NO: 13250 - DNA, 205 bp, Homo sapiens
ggttccagagcacactgatgccagttgcagcagatattaacacacctttcataaaaaggcccttggcacactgttgggttctggtagagacagaaggcctggccatgggacactaaatgaccaggcaaccgtaattccacatcatgagctggactctgtcagagctaccaagttctaaaggtgaacaagcccaacaattcatcac

SEQ ID NO: 13251 - DNA, 580 bp, Homo sapiens
gggttcaatatcaaagaaattatctcacccagactgatctggatattggcactattaagtgccccaactgttaacctcaaagaccattaaagttgctcctaacttgtttccaagatccaaactccttaaagtagggcatgaagtgaaagtgtgacctaaactgtctatgataatttgggtgttacctaagttagcaaattataaaattgggcttgtgcatcagcatttcactgaaacctggagagaaagtgtatgaagacaaagaaagactgaaagaaactagcacacaaacagaaagcttagacatccagaggaattgttcccactgctttccttcccctccttcacaccatgctctgcctacatggggagttttccatgaccacttgatggtgaaggagaaaacatccagtacaccgtatgtcaacagtacatggaagtggagaacttctgtctcatagccccattcaggcaagacctaaagattatagtaaagggactaggtgcagtggctcatgcctgtaatcccagcatttggggaggccaaggtggaccaatctcttgaggtcaggagttcgag

SEQ ID NO: 13252 - DNA, 645 bp, Homo sapiens
atggaaacttgccacatattaagacacaaaggaaacttcagtaattccacaaagcagagagaatctaaacatattctctaatcacagtacagtaaaactagaaattaaagactcaaaaattccctactggaaatgttactaactctattaaattactcttgggtcagaggacaaatacaaaccacaaccatataatttgttcaaaatggtaacaccttgtatcagaatccatgatgcaattaaagcaatgaggcaaagaaaattacatccaaaatgaaaaagaaacatcaaatgcaaaattaggaaaagattaaagtaaacaaaggagaaacagttgcaaaataacaagcaaggctgggtgtggcagctaatgcctgtaatctcaccactttgagaggctgaggcaggcacactgctttgagaccaggagtccgagaccagcttggccaacatggtgaaaccccatctctgctaaaactacaaaaattagccgggcatggtggctcacacctgtgatcccagctacttgggaagctgaggcaggagaatcgattgaacctgggaggtggaggttgcagtgagctgagatagcaccactgcacttcagcctgggagacagagtgagactcctccaaaaaaaaaaaa

SEQ ID NO: 13253 - DNA, 447 bp, Homo sapiens
acttatacttgatttgtaaataccatatttttttaaatcagaagatcatacttcccccactcctttttctcgccgtctttttcctctggatgtattttgctggaaacatacactgtattctaaaccctttctactcctagtgtccaaagtatggctgggcatgggcggctttggtatctatcaggggtttattagaaatgcagaccctcaagctccacccttcgtctgctgaaccagactttgcattttaacaagaatcccaggggattccttttgcaccttaggtgtgaggagcactgatctaatgcaatttaattgtcaggtttgaatcatcatttgttacataacccagtggcagagagaagaataaatactgaaaacaggccgggcatggtggctcacgccctgtatcccagcactttgggaggccgaggcgggcggatcacg

SEQ ID NO: 13254 - DNA, 360 bp, Homo sapiens
attgatcacccactaatagggaacgagagccgaacagttgaagagagttcactgactccccagccccaggtgggccttgtgcacatcatgaccagttttgaagatgctgacacagaagagacagtaacttgtctccagatgacggtttaccatcctggccagttgcagtgtggaatatttcagtcaataagttttaacagagagaaactcccttccagcgaagtggtgaaatttggccgaaattccaacatctgtcattatacttttcaggacaaacaggtttcccgagttcagttttctctgcagctgtttaaaaaattcaacagctcagttctctcctttgaaataaaaaatatgagt

SEQ ID NO: 13255 - DNA, 380 bp, Homo sapiens
ggcacgaggtgaaccttccccagtcctatcagagcagactttctggggttgcataccttcagaaaccgatttggggcccaatctgaatgcacatataagtgcgcatagcgctaaaattccaggcaacactttgtattgagagatgccaaaattttggtcaggccctgtgacatctaaagtcaccaatgtaactacaccatacagattaaaccctcacatgatcatgtaagctatgcagttacccaagctgcatcatttagaaaacctgtacagctgttatggaaaccatccctagtcaaggacactttaaatatgtagtctaaataccgttaaagtaggcccactagctgtgttcacattttcccttggccaccttacca

SEQ ID NO: 13256 - DNA, 498 bp, Homo sapiens
ttgttgttaccgtgtgccaatgtgtcccatgtgggttgtgccaggtagagaaacaggaagtcaatcatctgtgacagtctctattctgtcgttttgctccttggtatttgatttgcactatatttagttgaagcctgttcactgtttaaaaccggaggtatcttcaaaggcatggagacctggttccagtaaatgtcccaccagtggggtatagaaagcatgctcatgaccctgccgtgtcgtctgaggtacccgttcttatcctagtggttcaggaagagaaaacgcagtttgcactttcaagacagcttctctaaggctggcatgttatctccttgctttgctttttgccgttttaaaatgtgtaattgttccagcattccaatggtcttgtgcatagcaggggactgtaaccaaaaataaacatgtatttgtgtaattggtttgaagaagtcttgaatagctctttactgtcttacttggggttgataagatttg

SEQ ID NO: 13257 - DNA, 667 bp, Homo sapiens
gaattcggcacgaggtgggctctcccttaaagacacatggccacagacacctccttcgcatatgtaatatgccttcccctgcggccttccgtggtcacagcaacagggactgctcaccccctccagctggggcttttctaacaagcacagtcagaaatgcgcaggcctggggttggggatgaacagaagttgattagtgggcacagaaatacagttagatagaaggaatagttccagcattcgatattacagtagggagactgcatttaacaataattgattgtatatttgaaaacagctagaagaataagaatattcccaacacaaagaaaagataagcgaggtgaaggaaatcccagttaccctcattcagtccattacacattcgatacaggtatcaaaatatcataggcacctcaaagacatgtacaactcttaatttaacatttttgaaagaaaaaaaaaccggccagagcattaaaacaaataaaataagaaacacagaggccagtgttaggtgaagaactccgctgcttcagaaagagaatagcagcgctcgcttaccgtgggaacacggccagttaacaaaatgggttttggttttttgttttgttttgttttaccattggtaataagatagttaacataagtggtcagaacttcgctg

SEQ ID NO: 13258 - DNA, 502 bp, Homo sapiens
agcccaggagttcaagtccaacttgggcaacatgacaagacccttgtctctttaaaaaagcaactcaaaccatgtcttgaaaagctatttaatggtcagacacgatggctcacgcctgtaatcccagcactttgggaggccgaggcaggcggatcacttgaggtcaggagttcaagaccagcctggccaacatggcaaaacccagtctctactgaatgaaaatacaaaaattagctggcctagcagttggtggtggcaggtgcctgtagtcccagctacttgggaggctgaggcaggagaatcgcttgaatttgggaggcggaggttacagtgaacccacatggcgccactgcactccagcttgggtgatagagtgagactctatctcaaaaaaaaaaaaaaaaaaactcgagcctctagaactatagtgagtcgtattacgtagatccagacatgataagatacattgatgagtttggacaaaccacaactagaatgcagt

SEQ ID NO: 13259 - DNA, 495 bp, Homo sapiens
aaacatgagacatagaatcattgagattcatcaagaaatgtttaattataatgagcatgaagttagtaaaaggtggacatttgaagaaggtattaaaagaccttactttcatgtgaaacctttggaaaaggcacaactaaaaaactggaaagaatacttagaatttgaaattgaaaatgggactcatgaacgagttgtggttctctttgaaagatgtgtcatatcatgtgccctctatgaggagttttggattaagtatgccaagtacatggaaaaccatagcattgaaggagtgaggcatgtcttcagcagagcttgtactatacatctcccaaagaaacccatggtgcatatgctttgggcagcttttgaggaacagcagggtaatattaatgaagccaggaatatcttgaaaacatttgaagaatgtgttctaggattggcaatggttcgtttacgaagagtaagtttagaacgacggcatggaaatctgga

SEQ ID NO: 13260 - DNA, 397 bp, Homo sapiens
gaaatccaaagctgaccaaaacatggtccccaccttttggagcttacagtctgttctggggaacagagattcagccagagtcaagaaacactggatgccagctagattatctgttctgtgctttggtgtctataagtacatatgtggatatgggttcattttatccctaaacttagtaccaaaccagcatttaatatctaattataaatctaatttggcctaaactttattattgcacactgcctgaacaaaacctatttgtctctatgtaaattttttcctcatggaacaagggtgtgaaatgaaaatattttaggatttattcaaaaacagactattctgttttcagcttcagaattgatctttgaatcctaaggaacctctgtcaacagttgag

SEQ ID NO: 13261 - DNA, 662 bp, Homo sapiens
  misc_feature 662: n = A,T,C or G
acaaggtggacgcccaggaggagaactttctgcccaagtaccagcgtgtgaaggacctgtgtcagcgtgctgagtaccagacggcgtgtgagcagctgggacagaagtggcagtgtgtggaggacgccacggggaagctgaagctgcataagtgcaagggccccatgcggctgggcggcagcagagccctctccaacctcgtgcccaagtactacgggcagggcagcgaggcctgcacctgtgacagcggggactacaagctcagcctggccggacgccggaaaaaactcttcaagaagaagtacaaggccagctatgtccgcagtcgctccatccgctcagtggccatcgaggtggacggcagggtgtaccacgtatgcctgggtgatgccgcccagccccgaaacctcaccaagcggcactggccaggggcccctgaagaccaaaaagacaaagatggtggtgacttcagtggcactggaggccttcccgactactaggcggcaccccattaagtgaacattaggcttcttctaaagacaaacagtccatgggactggacttgtcaagtcctgaggcctgaagacacaacttccaatgacccgaattggaacctgcgaacaaatataaactgagggagccgaggtccctgagaaaacggn

SEQ ID NO: 13262 - DNA, 204 bp, Homo sapiens
gaggtgaaggctgcagtgagtcaagattgcaccactgtactccaccctaggcgacagagcaagaacctgtcttcaaaaaaaaaggaattcttagaaatatacaccagatattaccatacatatgaaactcatatatagagggttataaacttttgcagatcatttacctgcaacattgttgattttactccatgaattctctat

SEQ ID NO: 13263 - DNA, 152 bp, Homo sapiens
cagatatccctctctccatgaacaaggtgagtgagctctttttctgagtacatttggtttttcaaaatccctccaaggaatcatttccttgaccaaatgccctcatctgtggtggcgatcaacatctttgattttacccttttttttttttt

SEQ ID NO: 13264 - DNA, 483 bp, Homo sapiens
ggatttcaccatgttggccaggctggtctccaactcctggcctccaatgatcctcctgcctcagcctcccaaagtgctgggattataggcatgagccaccgtgcccagctgctaactagaaatgtaaagtgcacagagtggtagtgctggtaataattctagagtataaaaacaatttaaaattttttggagaatttgtttttcagatttgaaaagaaaaggtgaatgatacacatatctgtttaaaacaatgatacaggaaaggttttctttaaaacaggctaaaaatttttgccttcctttcctaatttctaaagatgatggaatagaaagaccattatctgggccaggtgcggtgggtcacgcctgtaaccccagcactttgggaggccgaggtgggcagatcacttgaggtcaggagtttgagaccagcctggctaacatggtgaaatccccatctctactaaaaatataaaaatcagc

SEQ ID NO: 13265 - DNA, 590 bp, Homo sapiens
aagaaggtgattgtgaagaaaagactggaaagcaaagaggaagtggtttccatacatttacttatttatttctttcaatatacttttgatatactcgttatttttctaactcattaattttctgaaatttagaaggtgaggttagagaggttaagtgactgtttaaagctccatggctgaaaaactgccaaaccatgatggtcttaagtcagaccgtcttcagtatcctggcctcttaccttgttgcttcactacgtgtcaagaagtaggatctattagatgtagtatctcaccataagaaaggtagatacaaagactagaaggaaagaagtaaccttaatctgcacttgcatgtggaaaatgcatatttttaagaggtaagaggtggaaagaaagtagaacaggatttgatggaaaggtaggaggaagtgaaagactggatggagctgagagaagttcacagagatgggacagttaaggagtatgagaaaataatgcatatgttgattgttaaaaactcattactcttcttgaaaagattaccttctaagccaggtggaggaaaaaattagattgaaaagatctgatag

SEQ ID NO: 13266 - DNA, 360 bp, Homo sapiens
atagatgagatttaatctctttagatgggaacaatccaataaagtcctacaataatatagggcaataaattttggagagctttaattactgtgcaagaaaaatattctagttgaaatgaagagtctccttggcctgtttccgcacagcagagcaaaccgtcttctccattcacatttcttggagttaagagcctggcctaggctgggcgtggtggctcacacctgtaattccaacactttggggggccaaagggggtggatcacctgaggtcaggagtttgagatcagcctgggcaacacagtgaaaccctgtctctacaaaaaatacaaatattagccacgtgtggtgacacacgcctg

SEQ ID NO: 13267 - DNA, 539 bp, Homo sapiens
ggcacgaggctactcaggagactgggcaggaggattgcttgagcccaggaggttggggcttcagtgagccatattcacaccactgcgttccagcctgggtgacagagcaaggtgctatctccaaaataaataaataaatgttaaatttgcttttttctctctctctttttttatgtagaatttgtttgttgatacttactgaatgtagtgaccctgctgtggtaatgaacacttctagtgccttctaggcttaaaataccagacagccccaaataacaaatgctcttttgtgttttgataggttggatttctgtttgcttaatattgggaatactggggggaaaaaagatggtgttttcattctaaggattgtcctaaagaaagtgctactttatttttaagaaagtaaggccacttgttatataagaaataacaagttcccattgggtcccattttgcaaaaggggataaagaattagactgatagcatcatacgaggcatatttcactatacaaagtgttgtacacctgtctataca

SEQ ID NO: 13268 - DNA, 501 bp, Homo sapiens
cgaattcggcacgagctcagctctcaccagctgtcagatgctgccacagggcgagaacctccaagatgtgctccccagggacatctactgccgcctcaagcgccacctggagtatgtcaagctcatgatgcccttgtggatgaccccagaccagcgcggcaaggggctctacgcagactacctcttcaatgctattgccggaaactgggagcgcaagaggcctgtctgggtgatgctcatggtcaactccctgactgaagtggacattaagtcccgtggagtgcctgtcttagacctgttccttgcccaggaggctgagcggctgaggaaacagactggggcagtggaaaaggtggaagagcagtgccatccattgaatgggttgaacttttcacaggtcatctttgctttgaaccagaccctcctgcagcaggaaagcctgcgagcaggcagtcttcagatcccctacacgacggaggatctcatcaaacactataactg

SEQ ID NO: 13269 - DNA, 578 bp, Homo sapiens
ccacctactgcgtcttggtcatggagaagaagagctggagacagagaaagatttcagcagaatcctcaggatggatttagccgactaaaacgatggattatgattggcgatcatcaccagttacctccagttattaagaacatggcctttcaaaagtactcaaacatggagcagtctctcttcactcgctttgttcgcgttggagttccgactgttgaccttgatgctcaagggagagccagagcaagcttgtgcaacctctacaactggcgatacaagaatctaggaaacttaccccatgtgcagctcttgccagagtttagtacagcaaatgctggcttactgtatgacttccagctcattaatgttgaagattttcaaggagtgggagaatctgaacctaatccttacttctatcagaatcttggagaggcagaatatgtagtagcactttttatgtacatgtgtttacttggttaccctgctgacaaaatcagtattctaacaacatataatggccaaaagcatcttattcgcgacatcatcaatagacgatgtggaaacaatccattgattgg

SEQ ID NO: 13270 - DNA, 367 bp, Homo sapiens
aaaggaataatgtgtccaaagattattatggaattgtctctctgcatacctatatcagctgtttgtcacagctgtgttcttatgtgactgattcttcctgaagattagaaactcctcaaagactggttattagagcttattcttcattatagccccagcacttagtgcaatgacagaagcaaaaatattaattgaattgagagaaaattgagatatagagacgagtcatttttgttcacaacagaactagtatttaatgaaatataatggaaaagactgagttgggttactgtttaactgagagcatcagagatggataggcagggaggatttagaactgagagtgaattacagcaatgagggaagc

SEQ ID NO: 13271 - DNA, 616 bp, Homo sapiens
catgtattaaaacttagatatcgcctcaccgtgaatgcatcagacactgtactgttctcaccactagggtgggccctctgcagccacaaatagaggagacagttggggataaaatcataactgatgaatagagagactgagtgcactagcaaacctgtagaaattctaggctcacaggaatagcaaaagacagcccactaaataaagagactgtcaagaagcatttcacacctaacatgagcaataaatggattcccatccaccaacaacgtttttcatgattttcctcatccacaggttcaatgagaagctttgtaaatttattttgtttaactgcagacaataatcactctcagggctgggcatggtggctcatgcctgtaataccagcactttgggaggctgaggcgggcggatcacctgaggtcaggagttcaagaccagcctggccaacatggtgaaaccctgtctctactaaaaatacaaaaatcagctgggcgtggtggtgggcgcctgtagtcccagctactcggaaggctgaggaaggagaatggcttgaacatgggaggcagaggttgcagtgagctgaaaatgcgccacatcactccagcctggg

SEQ ID NO: 13272 - DNA, 59 bp, Homo sapiens
ggaaacaaatccacacttagacacaacaatggtaaaacaggagcacctaacagattggg

SEQ ID NO: 13273 - DNA, 635 bp, Homo sapiens
tccaagaggtaactaaagtatccaggctgatggaagctccatcatcttgtggctatctcatctagtacccgaggcctttatggatgtcatagcagagtaagagagtgcaggagggttgagcaccagttctctggctcattggtcagagctagtgacatggcctcctcttcctctaagaggattgggaaatccagcaaacagtaattgactctaccacatcttttaagaatagtgttttctgctacatttaaccagagttactgccattgctttcattcaagaactctgactagtaaaggatatgggggtgagaatatttaaagatatatatcttcaatttttttctgcttacaaaagtgatacatacatgttataaaaatttgaacgtgactgggtgcagtggctcatgcctgtaatcccagcactttgggaggccggggcgggtgaaacacgaggtcaggagttcgagaccagcctggcctacatagcaaaaccccgtatctactaaaaatacaaaaattagccagggcgtggtggtgagcacctgtaatgccagctactcgggaggctgaggcaggaaaatcgcttgaacccataaggcaaaatttgcagtgagccaagatcacaccactgca

SEQ ID NO: 13274 - DNA, 126 bp, Homo sapiens
agtccaagcctcgtttatgtgagagtcccttccattaccacccccgacagcttctgctttcagcagtggtgagctttataaaattacctgttctggctgggcgcagtggctcacgcctgtaatccc

SEQ ID NO: 13275 - DNA, 82 bp, Homo sapiens
ggtacagcttactacatgcattcatcacatcatcaaacatgattatccaagccgctggactgccattgtggacaaaattggc

SEQ ID NO: 13276 - DNA, 502 bp, Homo sapiens
agacagattcagatgccacctttcctgtgagatgcaggttggcatagcagccactggggagctggtttcctgccatccacttgagagcatcctggatgttcttgggatcaatgaagatgaatttctgagcttggccaaagcattttgtgacaaacgctgtcagcctacatgggtaaagaggaaaatatggcatgaagaggaatttccaggtgagggtgcaatcatttcttcatttatttgggtgtatacttccagaaggggagctgagggaacatatgccatagcaggcctagaaaagagaggcattaatgggcaccaatgaggacaagaacaggggaggcacaagctcaggaagatcgagggacttgaccatccatgagggtgaaataaacagtattaaagaggtagaagactgagtgcaagaaggaaaggggttaaggggagaggtagtggaatagttccagagggctcaggaattatgctctggagtacagaactcatt

SEQ ID NO: 13277 - DNA, 441 bp, Homo sapiens
gatctagcattatattaaaggaacaatatatgattaaccaataacttccagaaattcagagatgacttgatatgagaaaatatatcagtgtaattaatcatgttaataattgaaaggagaaaaagagccagatgctgaaaaagaacttgaaaaaatcaacatctattttaaaaaaagatctttacaaaacttagggtagaaaagtaagtccttatcaatatgttatgcaatgtttattttaaattgtttatatgatacttaatagtatcatataaactttatacgatacaagcatccctgtcgaaatcaaggtccgaagaagagtcctcgttagcatgtgtatcatttaacattcttctggaatgtttagcctatgcaattagatttcaaaaagaaatcagaaacataagacagattactctttgatggtgatttgactac

SEQ ID NO: 13278 - DNA, 397 bp, Homo sapiens
ttcatgaaataatggctgttataatatatgaaaagttaggttaatataatccactttagaaggtaattttgaagatgtaaaaagaccacatatattgttaagtgctagtcagcagaagctctcttaacaccatgtcactgatttctgcaattaacctgccaactgatgccaaggaaatggtgaccacactgagccaatggaccattttctagcacctctgtccatttctcttctcatcagtttcttgccaagaatcaggtgtgtttgcttccaaacctgttttgtcaactgcacttgttattgtaattacataatcaatgaaatatcatgagaacaaatgaactgtatgtgtaaaagaaaatcaaattatgtctggaaaaaaattcttgataaagga

SEQ ID NO: 13279 - DNA, 130 bp, Homo sapiens
acattgccaggatcagcaaggacatggaggacagcgtggggctggattgcaaacgctacctgggcctcaccgtcgcctcttttcttggacttctagttttcctcacccctattgccttcatccttttacc

SEQ ID NO: 13280 - DNA, 376 bp, Homo sapiens
ttattggtatactacaatatgatttaacttttattttggggataaatagtagaaaaaagtgaaacagaatgaaggcaggtgttttttattctaatgatggaataatacagagatactggacgatctctagcagttaattattgtgacccatataaaattatacaggtcacagtataattctctattaccgtttttacaccagtaagtcttagataaactaagcatgcttatgaattatgtatacagttagaatgcattatttttacagaggaacaattgcttgtatgtactaacactgtactcttggcttgcctcaagttctactcattattttatataaaatactattaggctgggcacggtggctcacgcctat

SEQ ID NO: 13281 - DNA, 349 bp, Homo sapiens
ggcacgagggtaaaaggtggagaccatcattgtggaatcttgtattttctattaaggtttgtaatagtcctacaaacttgaacataaatttttaatatttgggaaggaacattcactgaagaattgataatagactaaaaaatatagctgttatcaattaatacatgatctgtccttgaacacatattcaccattatgtaaacctcacattatttcagcttatttattccacagataccaatagacatgttttcacattgtagcatctcccaaatcaaaatacttctaaaaattggtagtatgtcggccgggcgcagtggctcacgcctgtaatcccagcactttggga

SEQ ID NO: 13282 - DNA, 399 bp, Homo sapiens
ggaaccaggggctgcagaaccagcccctccccaatgaggaccccctctggacgcccctccccatggagaacaccaggagccacagaccccagaccacagagcacacaggggagggcacggggcggccggggcagggtgtctgctgcctcgtttatgggatttgctccgcgtctagcacactgctgcctgcagtgctcctgtcccctgcagtggctactctgggcctacgggcctaatcctggttggcatgaaaatgtcctgaggctactgtgacaaatttccacaagctgagtggcttaaaggaacacatttgatctcttacagttgcatgggccagaagagtctaaaaacagtcagcagggctggttcctcctggaggcttataggggctgaatccgg

SEQ ID NO: 13283 - DNA, 609 bp, Homo sapiens
ggcacgaggtatactttgacactgagaacaaagagacagttatatctggaatgggagaattacacctggaaatctatgctcagaggctggaaagagagtatggctgtccttgtatcacaggaaagccaaaagttgcctttcgagagaccattactgcccctgtcccgtttgactttacacataaaaaacaatcaggtggtgcaggccagtatggaaaagtaataggtgtcctggagcctctggacccagaggactacactaaattggaattttcagatgaaacattcggatcaaatattccaaagcagtttgtgcctgctgtagaaaaggggtttttagatgcctgcgagaagggccctctttctggtcacaagctctctgggctccggtttgtcctgcaagatggagcacaccacatggttgattctaatgaaatctctttcatccgagcaggagaaggtgctcttaaacaagccttggcaaatgcaacattatgtattcttgaacctattatggctgtggaagttgtagctccaaatgaatttcagggacaagtaattgcaggaattaaccgacgccatggggtaatcactgggcaagatggagttg

SEQ ID NO: 13284 - DNA, 601 bp, Homo sapiens
cgcttgttttaaagataattgctagatttatgttttagctttccataaaatgtaataacataaaataaaatataaataaaatatgaaataaaataaaagccatggggaaaaggtagggtttgattgctaataagaaatttcttggaaaagagactagctctcttttggttttccaaagtccacattttataacatttttagtgcttggtgtttgcttgtggtattacattagataaaaatgtatcacagtgttggtttatactggatgtttaaataggattcattgaaaggggtgtgttttctttctgaggaatacttactcagcattttcttcagaaagttacttgctgctaatcctttatggaggctctaggggaacatcattttcttgccttttccagcttctacaggctgtccacatcctcagctagtggccccttttcatcctttttttttttcttgaattatgagattttttgtactttgagttctgggatacatgtgcagaacgtgcaggtttgctacataggtatacaagtgccatggtggtttgctgtacccatcaacctgtcatctacattaggtatttctcctaatgcta

SEQ ID NO: 13285 - DNA, 527 bp, Homo sapiens
ggcacgaaaaaggatgatagccagaatgccatagatcacaaaattgagagtgatacagaggaaactcaagacacaagtgtagatcataatgagaccggaaacacaggagagtcttcggtggaagaaaatgaaaaacagcaaaatgcctctgaaagcaaactggaattgagaaataattcaaatacttgtaatatagagaatgagcttgaagactctaggaagactacagcatgtacagaattgagagacaagattgcttgtaatggagatgcttctagctctcagataatacatatttctgatgaaaatgaaggaaaagaaatgtgtgttctgcgaatgactcgagctagacgttcccaggtagaacagcagcagctcatcactgttgaaaaggctttggcaattctttctcagcctacaccctcacttgttgtggatcatgagcgattaaaaaatcttttgaagactgttgttaaaaaaagtcaaaactacaacatatttcagttggaaaatttgtatgcagtaat

SEQ ID NO: 13286 - DNA, 376 bp, Homo sapiens
ttgtcagaagacatgggaacacatctttaaaaacatgaaacaaaagaactgtcaactcagaattctacatagagcaaaaattgtcaagaatgaaagcaaaaaaaaaaaaaaaagaaccccttttggggaaaaaaaaaaactttaaaaatccggcccggggggggggctccccccttgaaccccaaccttttgggaggctgggggggggtggtcccgaaaatggggaattggaacccttctgggaaaccggggaaaaccccccctttactaataaacaaatattaaccgcgccggggggaaggcccttttgccccacttcctggaagcttagccagaaaatggggaaccccggaggcgatttgcagaggccgaaacc

SEQ ID NO: 13287 - DNA, 496 bp, Homo sapiens
tatgctgattttcccaatgctgaatggtatagcagctggtgaattttcaataagatacacttttctcctgttctagcaagttttgatatttgccatttggttccagaaacttattgtgtctatgttcctaaagcactttgactctgagagagaggacaaactgaacctgatatatgatgtttgtgccccttgacggaggctgaattttctgaacttgaatgatcaatacaacagtgtcttgctaaaaattgtctcgcagaaaatttttcattcatttttcttgatggcaagtaatgtattccttcatcagaacaattaaacatctttaatgatttttaaagacagggtgtaattacatgcacatgataaaaatttaagcagcaccaagggcgtacagtgaaaattaagtctctttcctgactggagatcatagtatgagtgtttcatggctcctttcagagagattccatgtctagcatttatacatgcacataaa

SEQ ID NO: 13288 - DNA, 521 bp, Homo sapiens
ggcacgagccctttgagatttctggctttttgtagggacctcagttccattttcccaactcatgggttctcaataccttaactatcttttatttgtcaaattccaagtcctcaactcacccaccactacctgacccactgcagtcaccacaccaccctacccactttcccagggatgctttatgattagcttaaatactcaccattctgatttgtaatgccgcccccaccccctttttttgacacctgggagtttccttttctttcttgtaagatcagcattacacaaacaagcacatttttcttattatactttatctagaaaacccaggtgtcagtggcagaagcattcctgaatttatgtagatcattgttttgctggaactggaaacctcctgaaacacagcagtggaattgcttgtaatcggctgtgtatatcatcaacaaaagtcaatattctattttttcaagtgtaatttaacataagaagttaaacatttaccattcaatttaaaactaaaa

SEQ ID NO: 13289 - DNA, 532 bp, Homo sapiens
ggcacgaggccatttgcaaccactgatgggaggaacagagagcagcatttcagaaccaggttctccttcgaggaacagagaaaatgaaaccagcagacagaatttgtcagatggaatttcactcttgttgcccaggctggagtgcaatgtcgcgatcttggctcactgcaacctccacctcccgggttcaagcgattctcctgccccagcctcccgagtagctgggattacaagcacctgccaccatgccagagtaatttttgtatttttagtagagatgggttttcgccatgttggccagactggtctcaaacccctgacctcagatgattcatccacctcggcctcccaaagtgctgggattacaggcatgagccaccaggcctggcccattctgtcttcttttctttcaacattcatagccccatatctaggcccttaaacatctcttcccttggctattgctatagtatcctaagtggtttcccttcctcttacacttccccttctagtacatactctctccttacta

SEQ ID NO: 13290 - DNA, 127 bp, Homo sapiens
aactgtatctatgttataatcgtaatggtaactcaatccaaaggacctagtcacaggaagtaacgtgtcgtacatatcagtcaatatatgggcctaagtagggacatactgtgatcttggtatactt

SEQ ID NO: 13291 - DNA, 592 bp, Homo sapiens
gccaaataggttgtaagcagttcagcaccttttgtcttttttagtaactaaaatctgcatttgatacagaatttccttcagtgtggtttctgcccttcacactttggtaatgagttttcctgagagccattctaggcaggcaaatgtctggttttaatagacagggtctttcagtcctttctgcaacttactagctgtgtgctcttcagcaagttgcataacttttcgaactcttaattttcttgtctgaaggaatgaagacgatgataatgatgtccatgtcataggtttgtcagggttaaagaaacaacgggccgggcgcagtggctcacgcctataatcccagcactttgggaagccgaggtgggtggatcacctgaggtcaggagttcaagaccagcctggccaacatggtgaaaccctgcctctactaaaaatacaaaaactcaccgggcatggtgtcaggtgcctgtaatcccagctactcaggagactgaggcaggagaattgcttgaacctgggaggcagaagtcacagggagctgagatcaagccattgcactccagcctgggtgacgagcgaaactttgtct

SEQ ID NO: 13292 - DNA, 50 bp, Homo sapiens
ggatgacctgtcagtattgaccccttgggctgaagcaattcgatcctctc

SEQ ID NO: 13293 - DNA, 583 bp, Homo sapiens
aggtaccaagtatgtatcggctactgtttgaagtggtgctgtgctggagttactaaacaaaacagacacaagtctctatttttgtgtaacagacatgcaggcaaaggatgacattaagttaagtttcaattaaagggaagattgtggacaagaaggaagatacactccaagcaagtccctcaatcttagaatagcttcttgggcctgctcccctattaaactgtgataagcactccacctgtctgcttatctgcaaagcaaaactgggtcttggaaaggactggtagactggtcttcatttttagcttacgctaataaaagagctgagcctgccgggggcagtggctcagtcctgtaatcccagcactttgggaggcggaggccagtggatcacttgaggtcaggagtttgagaccagcctggtcaatatagtgaaaccctgtctcttactaaaaacacaaaagagtagccaggcgtggtggtgcacgcctgtaatccctagctacttgggaggctgaggcaggagaaccgctggaactcggaaggcggaggttgcagtgagctgaaatggcaccatagcact

SEQ ID NO: 13294 - DNA, 324 bp, Homo sapiens
cagactccctggatttcactatggtggtcctgccatttattagccctacaattgtgatcaagtcactcattgctctaagcataagttaccctcatctataaaatggagtgataatagtacctgccacctagagatcttgtgagaccaaaataagataatccattcaacttttagcacagtgcttggcgcagagtatgctctcaatacacatttgctatttatcatgcaaaagcatgagggcaaggaagcataagatgtaatttaagaatactgagtaggccgggcgcggtggctcacacctgtattcccagcactttgggaggc

SEQ ID NO: 13295 - DNA, 529 bp, Homo sapiens
atataccgaagtgttcatgaaataaagcgtagaagttagtgcacgaatttgttctgggcgtttgttttagtattccagcattttgtttctattgctaactgatgagaaatgctttaaacacataaacatgttctgatgtgtatgtgtgagacttgcgtttcccaacgttgcataaaataagcacaaataagtgtaaaatagtgtaaaataactgcaaatagctttatcttacacagaaagacaggtgaacagctcgtctttaatcttaagcataacatttgttttggtaatcttataaagattgcttcttgcacatttttaaagaaaaaatgtgaaattaaacagattattaacgctatactagtcaatataccatatagtaacttcttgaaggacccttagcacagaactaagaaatgcaaaatcgttcttatttccgtcaagataaattttgacagaaatgtagcatttgaatctactcaaattgtatttccaagtccagtgaacggtagcaatgcacagttttatt

SEQ ID NO: 13296 - DNA, 514 bp, Homo sapiens
aagacttcctctaaagtggaactagcccaacctcggtgtacccacctcgaagtctcttttatatgttgagtttctaattattgatgctagtaccataaaatgaggatacaattatcatggcagccatgagtgaaatttttgtagaacaggatttattaatcatctgttttactgttcaaaaatctattagctaggactttctgccatgtgtataagcctgatttgtggaataagagaagtttggaagagtcactatataggaatcttccttttaagagggcatatgtttctaatacagggattttagctgtattattttggtctatatcgtaagtgtgctttttgtttaagaaacagagaaaaatgcttccaaagcaacagaattggaaaataaaaaccttggaccagttacaacagcagagaataaggatcagagcaaattggcatgtgtacatggtatcaaagggaccagtatttcttcagaagtaaacctaactgaaaggtaaaagagtga

SEQ ID NO: 13297 - DNA, 595 bp, Homo sapiens
agttttcatattccttagtgttatcacactggtgcacttactgttttaccattttcccttccgatttcatttttctgttagcatttactactatctaacatatattttactcatttgtctgtgttccccatcagaatataacttcatgaggggagggattttctattacacttagtgaaaagtaaatccctcaagtaggaacactacaagtatgcacagttttttttttacagtaagtttgcttaatggctagtaaactatctcagccagtacctgagtgactattctgacttgtatcatttaacaagaaaaaaggcctggcgcgctgtctcacgcctgtattcctagcactttgggaggccgagacgggtggatcacttgaggtcaggagttccagaccagcctggccaacatggtgaaaccttgtctctactaaaagtacaacaattagctgggcgtggtggcacatacctatagtcctagttacttgggaggctgaggcaggagaatcgcttgaacctgggaggtggaggttgcaatgagccgagactgcgccagtgcactacagtctgggtgacagagtaagactccatct

SEQ ID NO: 13298 - DNA, 398 bp, Homo sapiens
ccgttctggcccagcagaaattatatacttggcaacaagtctcatcacattttaaataaactgtcaaaaagataacattctcatgtttccgcaatttaattttaaaatgaaattaaatttttttgaaggtaaaatacattttggaaatctaaactgtttaactcttagaacgaacagtggaaaagagaaaatataactgaatgataaggaaaatatatacacatcagattgatgtgatgcagccaagtggcatgtagaagaaactctagtattagtataggtttttcctatactttccatgtagtatgaacattttatataagtattttaaatgcttatttaaaaaaggaaattacagagttaaccaaaacaaggatttgtagagaaaaggcatatgt

SEQ ID NO: 13299 - DNA, 451 bp, Homo sapiens
aaaccttagctgtagtgattggaattaacacttgggaagtcatgattgacaaatagagaaatataaatttgttttatatcagttatatatacatatttataactgatataaaacaaattagattttgacattagaaacacatatacacatactgtaatatgtactttcttcattctctttaacctatattctggttttaagtttcctggagcccgtggagtaatgggacaggaaggctcagagggtctctttactgatagttaagatacaaaaaaaactaggccaggcgcagtggctcacgcctgtgatcccagcactttgggaggccaaggcgggcggattatgaggtcgggagtttgagagcagcctggccaacatggtgaaaccccatctctactaaaaatagaaaaattagccgggcatggtggcaggcacctgtaatcccagctac

SEQ ID NO: 13300 - DNA, 227 bp, Homo sapiens
ggcacgaggggaagaatgcatctgagaatgatgagcgcttatctaacccccagattgagtggcagaatagcacaattgacagtgaggatggggaacagtttgacaacatgactgatggagtagctgagcccatgcatggcagcttagccggagttaaactgagcagccaacaggcctaagtgccaggttccctggcgttggtgacatgctgcagcctggaactctga

SEQ ID NO: 13301 - DNA, 130 bp, Homo sapiens
ggcacgagaaaaggagccagaacttgatgattttgaaaattctcagcctttctggttggcagagggtgatgaaattgagacacggcaaagatcaattcaagagccactccggggagaatggcggtctaaa

SEQ ID NO: 13302 - DNA, 483 bp, Homo sapiens
cgaattcggcacgaggtagagacggggtttcaccatgttggccaggatggtctcaatctcttgacctcgtgatctgcctgccttggcctcccaaagtgctgggattacaggtgtgagccaccacgcctggccggcttatttttatccacagtaaatcttcagcaactcattgtctccaccagatagtatttttctgtaaatgaaatgctgacttcgcctcttcctgctgtatgctcatccctgcactgagcacagatatgacaagcagtagccatgggggaggtgggtgacaaagataggaccccgggagggggcgcaggtacatgctagtttcaattaccacagtattctagagacgggttgcaatgacaaggggggcaaatgaaatcaatgcaagatttcttaataatgggcagacagaaaaatgtaaaaccacacaaaacggactgctgataatattttaaaatatacttatttgtcttc

SEQ ID NO: 13303 - DNA, 403 bp, Homo sapiens
ggcacgagctcattttattttgcatatattaaattgagtaggttcagctctaacataccttaagaaaaatgcatatcggtgcactgtatgtatttcaaaatgcctttcctatgattgtcatgtcctcctttaaggcttttccctcaaatttattacaaatttagtatttttagtacttgatgactctaattacatgaatgcacctggaatgacatttgtaacagaagacagtctgacttgctttcagtattcacaagttctttccagtttccaagtcttttcctagcagtaatttaggggagacagaggagtttcatgtaaagagcatgcagtttggagtcagaacctgggtatgactctgtggccttgatgaagcaagttacttaaactcttgagttttagc

SEQ ID NO: 13304 - DNA, 397 bp, Homo sapiens
ggcacgagctctctctctctctctctctctctctctctctctctctctctctctctctctcggtatctctctcggtgtggagctcttctccaacatctggggagctgggaccaagactgcccagatgtggtaccaacagggcttccgaagtctggaagacatccgcagccaggccttcctgacaacccagcaggccatcggcctgaagcattacagagacttcctggaacgtatgcccagggaggaggctacagagattgagcagacaggccagaaagcagcccagggctttaactgcgggctgctgtgtgtggcatagtggtcataccgacggggaaaggcgacctgcggtgatgacgacgtgctcatcactcacccagatagatggtcccaccgg

SEQ ID NO: 13305 - DNA, 413 bp, Homo sapiens
gaggctggttcagaaaaggaggaagaggcccggctggcagccctggaagagcagatgatggaggggaagaagcccagggtgatggcaggcaccttgaagctggaggataagcagcggctggcccaggaggaggagagtgaggccaagcgcctggccattatgatgatgaagaagcgggagaagtacctgtaccagaagatcatgtttggcaagaggcgaaaaatccgagaggccaacaagctggcggagaagcggaaagcccacgatgaggcggtgaggtctgagaagaaggccaagaaggcaaggccggagtgagtgcctgcggcccctcacagggctgatgccagcccctagcagctggatgtggcagaggcaggccagaggacctaagtgtgatggaccagagtcacttc

SEQ ID NO: 13306 - DNA, 223 bp, Homo sapiens
gagggttcttgaagcttttgagattaacaatggcaggaaaatcatcactttttaaagtaattctccttggagatggtggagttgggaagagttcacttatgaacagatatgtaactaataagtttgatacccagctcttccatacaataggtgtggaatttttaaataaagatttggaagtggatggacattttgttaccatgcagatttgggacacggcagg

SEQ ID NO: 13307 - DNA, 481 bp, Homo sapiens
ggcacgaggttcactcaacatcctgagaaagaaaatgaaggggacattacaatttttcctgaaagtttgcaaccttctgaaacgctaaagcagatgaatagcatgaattcagtaggcaccttcttagatgtaaaacgtctcagacagttaccaaaattattttaaccttttaactccctgcccttttaatacagggacagggtgtctcctgaagatacttagggaaaacaggagcctaccacaaggctcctgatcattctggagtcactgtttcttggtagcagccaattgggaagagtgacttctgtgagatggctggctggtgataggactaagttctcattgttcaaatagagctgttcaacatcactgaaacctttaagaaaagccctgagatcagttattcctacaagtttaagtagtagacagatactatccagctctaagtctcaactgctcttttatactgtacttttttttt

SEQ ID NO: 13308 - DNA, 509 bp, Homo sapiens
ggcacgaggtggcccataagttttaccttttaaacatccggctgcctgtgaatgagaagaagaaaatcaatgtgggaattggggagataaaggatatccggttggtggggatccaccaaaatggaggcttcaccaaggtgtggtttgccatgaagaccttccttacgcccagcatcttcatcattatggtgtggtattggaggaggatcaccatgatgtcccgacccccagtgcttctggaaaaagtcatctttgcccttgggatttccatgacctttatcaatatcccagtggaatggttttccatcgggtttgactggacctggatgctgctgtttggtgacatccgacagggcatcttctatgcgatgcttctgtccttctggatcatcttctgtggcgagcacatgatggatcagcacgagcggaaccacatcgcagggtattggaagcaagtcggacccattgccgatggctccttctgcctcttcatatttgacatgtgtgag

SEQ ID NO: 13309 - DNA, 404 bp, Homo sapiens
tattcggcacgaggcactatgaaagggaaggaaacgcttcagggctttgtaactgacatcacagcaaagacagcagggaaagctctgtcactggtgattgtggatcaggagaaatgcttcagtgctcagaatcctccaagaagagggaaacagggagcaaataaacagaccaagaagcagcagcagagacaaccagaggccagcatagggtccatggtatccagggtagacgctgaagaggcattggtggatctgcagctacacacagaagcccaggctcaaattgtgcagagctggaaagagctggccgacttcacatgcgcattcacaaaggctgtggctgaggcgcccttcaagaagctccgagatgaaactaccttctccttctgtctggagagtgactg

SEQ ID NO: 13310 - DNA, 464 bp, Homo sapiens
ggcacgagggtgcccatcaccacacccagctaacttttgtatttttagtagagacggggtttcaccatgttggccaggctggtcttgaactcctgacctcgtgatccgcccgccttggccccgcaaagtgctgggattacaagcatgagcccagcgcctggctgtatctttcattttacccaagtcactttacccaagtaagtaattaggggaaagcctgagtcttgtaccacctgttcatttggggaactgtgggaaacggagccaacggacctaagtgccctttgacagtgagtttcataccatttcagtagtgtatttctttcttaatctgaataaaccagaatgatactctcagcacagaagaataaagggagcgagtcattaacgttttctttttaaacctttatgatgacttccttatgaattactgaacgaacactggaatgggactcaggtatcct

SEQ ID NO: 13311 - DNA, 177 bp, Homo sapiens
gagacggccctcggtaagggatcagtggggcagggggaaggcggcacaatgaaaaacggagtgagaaacaggaagctttctccgaaaggagaagaagataagagtggacgaaggaagaactcgagatggtgggatatgttctgagggagagaatggagggtggaaatgcacaaagag

SEQ ID NO: 13312 - DNA, 548 bp, Homo sapiens
actccaggctgagaaagagaattaggaggcctgaggaggggccgaggaaaggctgttggggtgtgctggggttggtacccgagcgccttcccctcacctcaaccagagaagagcatccggttgctttttaaagcttttagcctgccctagcaaggacaaagcatgttagattagagatgcttctgctgatcgcaggggttcttatttgaaaacatctatgatgggggtggggtgggaggagacaggttgtggttatgcaggaaaatcttgtcctaaaaatatatgagtttgggggtaaggggtgggatagccaagcaaaatcagtaattattttaaaatgaacatatgtatttttattaacttttagttaaatacagattttacaacgaggtcagcataagcctaaatctatatagagggctaactcaggcattgtcttgtttatttgtagactggattaaaaacaacctgtcctgttttgtcagttcccagcttcttcgtttagaataaattagaccaaaagaagaaacgtgcttgtctctgtatac

SEQ ID NO: 13313 - DNA, 244 bp, Homo sapiens
aaattgatgtctgacaaagatcttcttacgtgtagtaaatgaattctgctctccaaatatgaagtgaaactgcatcaattcaagaaatgcctacaatcccttcagcatggtggttccactgaaaggcccttaagaataacggatattttactcacatgttttgagattagtagaaccgtcgtggctttatgtgtctatttagttactacattcagaaaactgagggtataaaacaaactttaac

SEQ ID NO: 13314 - DNA, 68 bp, Homo sapiens
gtaagtcacaatctctttgaggctctattttgttaactataaaatagggacagtaatgtctacaatat

SEQ ID NO: 13315 - DNA, 251 bp, Homo sapiens
actaaaaatacaaaaattagccggacgcagtggcacgcgcctgtaatcccagctactcaagaggctgaggcacgagaatcacttgaacccgggagggagaggttgcagtgagccaagatcgtaccaccgcactccagcctgggtgacagagtgagactctgtctccaaaaaaaaaacttggctggaatataattttggccttacaggggatcattctagtaggaaaggacaataaaattttttatcaaaat

SEQ ID NO: 13316 - DNA, 86 bp, Homo sapiens
gatttctataatttctaaaaactcttaatacctgccaaagctgactccacagggagcagacttgttcccatttttccacagtcccc

SEQ ID NO: 13317 - DNA, 369 bp, Homo sapiens
atactgaaggtaatagggcaggctggttccatcagggctgagaggcctgctgaagatccttccacaagagctgttccttgagtctgtgtagacagttggaaattaaagtgagagaggagaaggaataatgaaggaggctgccatttaaaaatgtcttgcctgaaaactaggccgggagcggtggctcacgcctgtaatcccaacattttgggaggccgaggcgggcggatcacttgaggtcaggagtcgagaccagcctggccaacatggcgaaaccccgtctttactaaaaatacaaaaattagcaggacgtggcacacatctgtaatcccagctactcaggaagctgaggcatgagagtccgttgaa

SEQ ID NO: 13318 - DNA, 207 bp, Homo sapiens
ttctcagaaggcttatctgatgatccactcacctctccttccaccttaagggaagaatggaagataataagcaaaacttctagaaagagcaattagcccttcaacttctaatatccaggtggttcagttcccagtgagagaggtaagtgggcaatggtaagctgtgccacacaccaggtatcttatttttcaagaatagctttcttg

SEQ ID NO: 13319 - DNA, 379 bp, Homo sapiens
agctatatataaacaacctgcaacaggagggtcgtagaacccagaagcattagtcctggaggacttcctgaaagaggtgagttttggctaagttcctgtcaatgatgctggcatagactataagagaggaggctgggcacagtggctcatgcctgtaatcccagcactttgagaggccaaggcaggcggatcacctgaggtcaggagttcgagaccaggctggccaacatgaggaaacgctatctctactaaaaataaaaaaattagccaggcgtggtggtggacacttataatcccagatactcgggaggctgaggtaggagagtcacttgaacctggtaggtggaggttgcagtgagtcaagatcatgccactgcac

SEQ ID NO: 13320 - DNA, 342 bp, Homo sapiens
tgcatctcttgttatcttctgtgaagtgagtcagtttcaactttgcctttgtgcttatgtgtcattctctgctctttgatgttcaagtctatattggttccagactctgttttatttaatctgtttgttttctttctaaaaacatattctatattcccgttcaagagtggagctaacttcacaggatttgggaaaattctgattattctagcccatacacagaatgcccaggacaaggaagacaccacttctctgaggaattgtgccaagaatacaagtcggtgaagtcagcatgcacatgttgaatgtttacaatgtgccaggtactttcatatactattc

SEQ ID NO: 13321 - DNA, 423 bp, Homo sapiens
atatgccaaattttgtattataattcaatctgtatgacagttatgtgagtttttttttgttttgttttatgcttgtgtgaagatttttgtagttaagctttttttaaaaaaaagtcaactgagttacttacgtgatgaaattagaacacatacttcttacaagcacattctctcctatccccctctccatttcagttggcaccataatgccatttttgcctaaccataacataaattaatatcattttattttatggagtttttctttctgggataataacatttctgctttgttgcataattatcacagacaggtttttctttttttggagatggagtcttgctctgtcacccaggctggagtacagtggcgcgatcttggctcactgcaacctctgcctcccaggttcaagcaattctcct

SEQ ID NO: 13322 - DNA, 348 bp, Homo sapiens
aaaaacaaaaattcccataaaaaaaatagatgtttcttacatgttgagcatatatggatttcatttttaatatgattgtagaaacattagatttaaagcatattgaaaaagaaaacagtatattctttaggagcttcaaaaaagggttttggtttagttcaaagggtgaaagaagatcttttattattttggtaaataacttctaaggaaacaaaccaccctcacatgcactatctcatttgtatttctgtcaattctgaaaggccagcatttggccagtattatttgaatctgtattgtattttttaaccagaagaatgaaggtttatagcttcattcttttggaag

SEQ ID NO: 13323 - DNA, 510 bp, Homo sapiens
tgtcagaatcagaaagtgttgaagaagaaaatattagttacctaaatgagagttctggggaagagtgggattcctctgaagaagaggactctatggtgcccaacttatcgcctcttgagagtcttgcctggcaggttaagtgccttttaaaatattccacaacttggaaacctttaaatcctaattcctggttgtatcatgctaaactgttggatccaagcacaccagtccatatacttcgagagataggtctaagactctcccattgttcccattgtgtccccaaactggaaccaattcctgaatggccccctctggcctcttgtggagtcccaccttttcaaaagcctcttacaagtcccagccggctctctagagatcatgccactctaaatggagcactgcaatttgccaccaaacagctaagccgaacattgagtagagccactcccatacctgaatacctaaaacagatccctaattcatgtgtttctgggtgttgctgtggct

SEQ ID NO: 13324 - DNA, 300 bp, Homo sapiens
aatagcatgagcgtcaaaaacaggctgattcaaatcctgttatccagatgcaagtggttatgtactctaagcctcagtttcatcatctgaatatagatatggtacttatcttacaaggttgtgataactaaacataataatgtatataaggcatagcatagcatttggcacatactaggtgcccagtgtgtagtaattgctgtgactacatggtataccaccttcctctccctgagaaatctcaggatattggacacactgaactactccattctaaaccttaaaaataaaaacaaaagg

SEQ ID NO: 13325 - DNA, 517 bp, Homo sapiens
  misc_feature 117: n = A,T,C or G
tgacatcaaacaaaaaaagactctgaacagcaatgaaaattatcaaaaaatgaaaaggcaacctacagaatggaagaaaatagttgcacaccatatatctgacacagagttaatatnccgaaatatataaggaactcctacagggagtgcaacttgtagtagcaggctaacccttgcagtagtaggttaaccaagatcacacaactaactaaaggcagagctgggacttcaacagagtctattgacaccaaaatctttgcgcccttaaaaccttctcaaaacttttgggaagggctaacttttgaggtaggcataggaagaggaactagtgaaaagtggccaaggcagagtttcaaggaggtaggaaacctcggaattactgataatgaaggaagaggacatcccaagtggtggtacagaaggggctgttcagggctgtctcaaggagagaacaaaagagtgagtgtcgcctgtaatcccagcactttggcaggctgaggtgggcggatcacctgag

SEQ ID NO: 13326 - DNA, 123 bp, Homo sapiens
gtgatctgcccgcctcggcctcccaaagtgctgggattacagacgtgagcacccagcctggatgttgtttttgatgacactgctaagcacttatgtgagggattgtttgggtggtttgggtct

SEQ ID NO: 13327 - DNA, 493 bp, Homo sapiens
tgccacctccgcctcccgggtttaagtgattctcccgcctccgcctccggagtagctgggatgcgccaccacgcccagctaatttttgtatttttagtacagactaattttagggcttcaccatgttggtcaggatggtctccatctctttaaaagtgaatgaggaacttccttgagaggagacgctgcactgattttatggagactcaactcctgaccactgggatgggccattcccttctagctggggctgttttaactgctcccttcgagggcaggcatcagctgagtttggtccggatttcctttctggtttttggttcttgcgaaagtgcttttcttgtgtaaatagttgttaaattggtgtccttgctggagagacgatctgtggagcattctgcgccgccatcttgctttgcctcccacctcagcattgcttttaatggcctcggtggcagctgggattttatccctgccacgtgagatggatatt

SEQ ID NO: 13328 - DNA, 452 bp, Homo sapiens
ttctagagtcagatgtttcacaactatgtcatctttctgttgaatagtctatttcaaatactttattccaattatgcaagataatgggatgaagctcctaaaagttggaacgttaaaataaatatttttttgttgtcatcctgagtgttctgcacttaggaggcattaagcggatgttgctgcatgactgaaaaatggggaatctatgcttaagaacttgataaactaccatgttgcagttttcagtaatagactgaaaatgtaataataactcatactggccgggcgcggtggcttatgccggcaatcccagcactttgggaggccgaggtgggtggatcacgaggtcaagagatcgagaccatcctagccaacatggtgaaaccccatctctactaaaaatacaaaactaagctgggtgtggtgggacgtgcgtgtaatcccagctactc

SEQ ID NO: 13329 - DNA, 423 bp, Homo sapiens
catccacattttattggaaaaatattattttataaatggagaaaagcctggaaagacctctaccaaaatactaaaggtgctttttctggatggtgcatttataaatgttgttaacttctttatgttattcaatggacatgcattttgtgagcaggaatgattatatttaaaaatctgagtttgaatgccaatttgatcgtgtctcagctgtgctatctttggcaagccacttcttttccagagttccaatttctacacttctaggactggggtaataaagtcattttcatagcattgttctgagaaagaaaatgagatcatgtgtatgtgtattgtgtgtgtgttgtgtatgtgtgtaccctgaggctagatctggcacacttttagagcaactccagtatgatggccacacacagacactct

SEQ ID NO: 13330 - DNA, 401 bp, Homo sapiens
tacggctgcgagaagacgacagaggggccatttgagaacttacagcaagagaaaactctcaaggaaaacaaagcttgatctgcaaaggtcacgtgtgtacctacgctgggggaagagacctttccaaagctctttttgtgtactggaaaaaactcattacctgttcttcagtatgggaatagtcaaataaatgaggacccagccccataataaaatactatgtagtcaccaaaaagaatgaggtaagaatgtaggagtactgactgggaacaatgctgatgatacagttttcaatgcaaaaagcaagttccacaacaatatacagagtacaatcctgattttcgtaaaagaaatacaatttaatcaggatacatacatatgtatgtaattatacatatgca

SEQ ID NO: 13331 - DNA, 386 bp, Homo sapiens
cttaatggaggcagatgttagcagggatgaaatacaggtgcctgtgctggatactgaggatgcgtggctctccgtggaaggaccaatctccatagtggaactggcccttgaacagaagcacatccactacccactggtggagcaccactccatcctgtgctccatcttgtatgcagtcatgaggttttctctgaagaccgtgaagccactttcactttttgacagtaagggaaaaaatgcatttttcaaagacctaacttcaattcagttattacctagtggggaaatggatccaaattttatttctgtacgacaacagttcttattgaaagttgtcagtgcagctgtccaggcccaacattcagccacaaaggtcaaagatccca

SEQ ID NO: 13332 - DNA, 500 bp, Homo sapiens
acccacggagaattatctaccaacaatatgcatcatagaaatttagaaaacagaagaaaagtcactacagtcctaccactcttactgttaaggtttttgaaatatatagagttttagccataaatataaatgatttcatatagcatgtattttataaaaattggtttatactgtacattctatcttgtgatgtgatgtttttcacctgccactgtatcatgcccatttccctctctctgctgtctgtattcttcttgatgtggtgaagcatctttgcccaatcttctgttcccttgtgccctgctctctgcctaacatttaattgtactaagtatacaatcagagttttagaggttgaagagcagagatttcagatcatctggtccaaccttttcatttaacatgtgtgttaactttctcatttaacataattacatttcactgagaccttctggaaccaacaagaaaaccttaatatggaactggcatgatgggaattt

SEQ ID NO: 13333 - DNA, 100 bp, Homo sapiens
tatgctctgtctctttcacttaggccactctggcaaaatacatccatgttcaaataggtatgaactgcttctttttatgagctaataagcagtgagtatg

SEQ ID NO: 13334 - DNA, 304 bp, Homo sapiens
tgtcttttgaatagtgtgcctttaatagaacacatatagcatagttctagggattagagtcttctgacttcattactatttttacagtaatttatatcttggtttcttcaattagaaaaaaaaatcgggcctgattttttatttcatttactagctcagctgttctcacacctacctgctgaattagaagggacaagtataatccatcttcttttcttctttccctccttctgtaataatgtttttctattttgcaggggtaattttttttttttttgaaaaacccgttttgttttgcccccca

SEQ ID NO: 13335 - DNA, 434 bp, Homo sapiens
gtaagaaattcttctttcaaggcagttgtcttcgtatctatcattttaccatacctggttaaaacagagtcccaggtacatattaaagcaagccttcatacatgttggccctctatctaaaagcctcttcccactcctttccctttacctggtaatccctgttattccctagatgcctgctttaaagagatttcctttggtaaatcaccctgaaccctcagactagtccagacctctctttgatattttcctcttgacattcagcatttatcccaattgaaagtaataattacatttgtgtagttattagattatctgtcttccttagtaaaaagtaagcttatgggctgggtgccatggctcatacttataatcccagcacactgggaggctgaggcaggaggatcacttgaccccaggagtttgaaaccatc

SEQ ID NO: 13336 - DNA, 369 bp, Homo sapiens
cctagagtcatcctctgtgctgtttcgtgagttttgcagcggagacttcaccatccggaggagctgtgtttctgtgtcacttgggatatcaccttaaaatatcaaatgtttcatgtcgacgcggccgcgaattccagatctatgaatcgtagatactgaaaaaccccgcaagttcacttcaactgtgcatcgtgcaccatctcaatttctttcatttatacatcgttttgccttcttttatgtaactatactcctctaagtttcaatcttggccatgtaacctctgatctatagaattttttaaatgactagaattaatgcccatcttttttttggacctaaattcttcatgaaaatatattacgaggg

SEQ ID NO: 13337 - DNA, 469 bp, Homo sapiens
ggcacgaggtttaaagaaaacatacaagggtatgacggagatatgattaggagagggaatgctttttgagggcagaattgccaatctgcttgtactttataagcctgttgattgtttagatacggtttagccagtttatagttaccctgggtgctgaaaggtatgctggatgatacctaaccaacagagaaccattgaatgccgttcaaaatggactgaagcatcagcaatgtctgaaaaaggcctgacagtaatgtacatgtcaaatggcccgtaatttaagcagagtagagtaagtagaagaataaacatggggaaagttccagcaacagaggaggctttgagcttttgctcttcatcttgagtggatgttgttctcaggtggtaataggccatcgagctttctccactggctgcctctctggggaacaaataaccgaaaagatactcagcaccctggttggtacat

SEQ ID NO: 13338 - DNA, 529 bp, Homo sapiens
gccgccccactcgccccagccgccgccatgaaggccgaggtgcagcgcgtaacccgggccagcgtcacagttggaggagagcagattagtgccattggaaggggcatatgtgtgttgctgggtatttccctggaggatacgcagaaggaactggaacacatggtccgaaagattctaaacctgcgtgtatttgaggatgagagtgggaagcactggtcgaagagtgtgatggacaaacagtacgagattctgagtgtcagccagtataccctccagtgtgtcctgaagggaaacaagcctgatttgcacctagcaatgcccacggagcaggcagagggcttctacaacagcttcctggagcagctgcgtaaaacatacaggccggagcttatcaaagatggcaagtttggggcctacatgcatgtgcacattcagaatgatgggcctgtgaccatagagctggaatcgccagctcccggcactgctacctctgacccaaagcagctgtcaaagctcgaaaaacagcagc

SEQ ID NO: 13339 - DNA, 490 bp, Homo sapiens
ctatttaaaagtttcattttcttttgcaattttagttttatgtactgttaaagaattgtactgaattctttttagatcacagtaaaaataggttggcagagatttcagtttcccagggcttaaccagaaccgccacctcaatgcattgtcagtagaatacattattagaaactgttaaggtctttcccgggacatttttttctgccattttcttttgcaattgtagttttatgtaccgttaaagaattgtattgaattctttttagatcaaagtaaaaataggtcagcagagatttcagtttcccagggcttaaccagaaccgccacctcaatgcattgtcagtaggatacattattagaaactgttagggtctttcccaggacatttttttttctgtatcatgtctccccatcattgaagcgcaaattttcttgaattcaaatactcccaatgagcttgtatacttccaaacagctaaacttgatttcc

SEQ ID NO: 13340 - DNA, 388 bp, Homo sapiens
ggcacgagggacagtagacaaaagagagagagaccgaggcagagatagagaaaaaaggcccaaagagagtcccctcaggccaactttggttttcacttctcagttctgagagccgaggaagcaggaaggagctgtgagaaactgagctctaaccttggccatcaaagacaagctgtgcagctctggttttttgagggcaggacatggagggtcaggcccagctggaggcgcaccaaagcccagagaaaattcagaaccacgtgaacttgttggatttcagccccttgaagcacatgttgctattgcagctgccttgataactggggggacaggaggagcacggctttcccatcttgtacggggactcgccaatccagttgcccctgga

SEQ ID NO: 13341 - DNA, 399 bp, Homo sapiens
  misc_feature 399: n = A,T,C or G
ggcacgagagaaaacctcctttgggagaccaatgtgggacaatgagttttctacaatagctacctcccaccccaagtctgtagtgggagttttcttatgtggccctcggactttggcaaagagcctgcgcaaatgctgtcaccgatattccagtctggatcctagaaaggttcaattctacttcaacaaagaaaatttttgagttataggaataaggacgggaatctgcattttgtctctttgtatcttcagtaatttacttggtctcgtcaggtttgagcagtcactttaggataagaatgtgcctctcaagccttgactccctggtattctttttttgattgcattcaacttcgttacttgagcttcagcaacttaagaacttctgaagttcttaan

SEQ ID NO: 13342 - DNA, 358 bp, Homo sapiens
  misc_feature 358: n = A,T,C or G
cattcattatcaggaagttttagttatctgtcatttttttttttcacatcagtttgatcaggaaagtgtataacacatcttaaagcaagagttagtttggtattaaatcctcattagaacaaccacctgtttcactaataacttacccctgatgagtctatctaaacatatgcattttaagccttcaaattacattatcaacatgagagaaatcaccaccaaagaagatgttcaaaataatagtcccatatctgtaatcatatctacatgcaatgttagtaattctgaagttttttaaatttatggctatttttacacgatgatgaattttgacagtttgtgcattttctttatacan

SEQ ID NO: 13343 - DNA, 573 bp, Homo sapiens
cagattgctgggtcctacccaagagtttcatctgcatttttaccaagttcccaggtgacactgatgctacaggctgaggagccacactttgagaactactggtccaaagaaggctgctcagagctgcttctagtcagattcagtggcctgcaggtgaaggggtaggtgtatctggagccccacctgaagtctggcctggttttcagtgctctaaaagggatgatcaagactaaggattttaaagttaagaggaggctggactcagtggctcacaccagtaaacccagtgctttgggaggcccaggcaggaagatccttagaggccaggagttagaggttacagtgagttatgattgcaccacggcactccagcctgggcaaacagaacaagccccatctggccggatatggtggctcacgcctgtaaccccagaactttgggaggccaaggtgggcggacaacttgaggtcaggagtttgagaccagcatgccaacatggtgaaaccccgtctctactaaagatataaaaattgatcaggcatggtagcacatgcctgtaatactaagtactt

SEQ ID NO: 13344 - DNA, 72 bp, Homo sapiens
aatgccccaactaaatactaccgtatggcccaccataattacccccatactccttacactattcctcatcac

SEQ ID NO: 13345 - DNA, 241 bp, Homo sapiens
tacggttgcgaaaaaacaacaaaagggtacggctgcgaaaaaacaacaaaagggtacggttgcgaaaaaacgacaaaagggtacggttgcgaaaaaacgacaaaagggtacggctgcgaaaaaacgacaaaagggtacggctgcgagaagacgacagaagggtacggctgcgaaaaaacgacagaagggttcggctgctagaagacgacagaagggtactgttgcgagaagacgactgatg

SEQ ID NO: 13346 - DNA, 500 bp, Homo sapiens
aacactaatggccctccctggaacagacacggcgcccccccacagaatagcctcgatgccccctggaacagcctcggtgccccctggaacagcctcggtgccccctggaacagcctggtgctcctggaacagacacagcccccccagaacagacacagcaccccctggaacagcctggcgcttcctggaatggccacatccccccatcctttctgtgctgctttaggcatctgcccttacgtggttcgtgtccagctctgtcaacaaggccagctccacaagaggccccagctcagccctccccagtgggctcccctactcaggctctgggtcagcttcttcccaggaggtgtcctggcccctgtgctggccccgcctcgctgcctggacacctgtccgtgccaccctggtcactgagcaggacatccgcgtctgtggcccctgggaccctgcccccgacagccaggcctgggtttgtccttttaggtagagtgcctggt

SEQ ID NO: 13347 - DNA, 324 bp, Homo sapiens
  misc_feature 188: n = A,T,C or G
tttacatagtacaactgctttatcctttcaaaagcagatacgtcaatcaaaacttgacatttatttatctatatttatgctgagttcccttaaaatgttttgtctttttccatataaccaatcatattatttcctaaaaataaacttaggtattgtcacagggataagaacttctgctttccatactngtgtgtggggattttgggtttgttccgtttttttgagatgaggctcactctgtcgctggctggagaacaggggcgctatctggctgggattacggtgggagcaacgcgcccagcctgttttttttaaaggggatcc

SEQ ID NO: 13348 - DNA, 332 bp, Homo sapiens
gacgacagagggggcctcctgagtacctgggattacaggcacccgccaccacgcctggctgacttttgtctttttagtagagacggggtttcactatattggccaggctagtcttgaactcctgacctcaagtgatccacttgccttggcctcccaaagtgctaggattacaggcatgagccaccacacctagccaggattcccaatctttatttgccttgaggctgatggaaaattgctggagttctacctgggattcttaatataaactaacatatatacatatacaaatatatatgtgtgtacatataactgtaaaaaatagtgcgggc

SEQ ID NO: 13349 - DNA, 157 bp, Homo sapiens
ggtaaataaggatacttgtggctgggtgcggtgggtcacgcctgtaattccagcactttgggaaaccgaggagggaggattgcttgagcccaggatttcaagaccagcctgggcaacatcgtgaaaccccatctcaacaaaaaatacaaaaagaaaa

SEQ ID NO: 13350 - DNA, 235 bp, Homo sapiens
gattacaggcgtgcaccaccatgcccagctagtttttgtatttttaatagagatgaggtttcaccttgttggccaggctggtctcgactcctgacctcaggtgatccactcaccttggcctcccaaagtgctgggattacaggtgtgagccactgcgcccggcctactacatacatttctaaaaaaaaaaaaaaaaaaaaaaaaaaaaaggggggccgttttttccggaaaccca

SEQ ID NO: 13351 - DNA, 230 bp, Homo sapiens
cagtttgttcttaaagttaaactaatggggaaaaaaaacaggacagggaggtatctcaagttcatttgagccatttttaaaattttggtagctggtttctgtttttcttctttttaaaatagtaacaacttaggattttgtgtgccaccagcttccattccatttcataaaagcttaatctagcaagaattggtgagccctagtagaagttagaaagaaatgttgaagtg

SEQ ID NO: 13352 - DNA, 444 bp, Homo sapiens
tttactttgaagagcactaaaattagagccgtcctgcttttaaggcaaggaaggtgggatagcagatgcagggctgggagagttcatgtaatcagtgtcccccttatccatgggggctgtgatccaagacccccagtggatgcctgaaacctcagatagtactgaatcctatatatacactgttttttttctagaaatgcatatctgttataaagttgaatttataaattaggcacagtgagagattcacaataactaaaaaataaaataggccaggcctggtggctcacacctgtaatcccaccactttgggaggctgaggcgggaggatcacctgaggtcaggagtttgggagcagcctggccaacatggcgaaaccctgtctctactaaaaataggaaaattagctgggctaatttttgggtcacaggcacctgtaatccc

SEQ ID NO: 13353 - DNA, 410 bp, Homo sapiens
aaacccaaaaatactactgtaagtatataagaacataattgaatgtgaaattgttctgttttatgtaaattatgtttaaagctaataaaggggaaatgtagaaaattataaagaatttaagaaataaggccgggcacagtggctcacgcctgtaatcccagcactttgggaggccgaggcgggcggatcacgaggtcaggagatcaagaccatcctggctaacatggtgaaaccccatctctactaaaaaaaatacaaaaacttagctgggcatggtggcaggtgtctgtagtcccagctacttgggaggctgaggcaggagaatggcgtgaacccgggaggtggagattgtagtgagccgagattggccactgcactccagcctgggcgacagagcaagactttgtctc

SEQ ID NO: 13354 - DNA, 514 bp, Homo sapiens
acccctttcctctcccgggacacagctagagtgctgtgagcttgtcggtgtgccgtttagtgtccttctgaggtctcatgtggccttgctctctccccagctacaccgcgagctctttgagagcacggaccaggtctccggtttctctcatacccctaaaggctcggcacagagctctgctctgaagaggggcccagcgagggctgctgtctggccatggcggtcatatttctacctgagtgctggactctggggcccaagaagccccaactcatgttacacaagaagccggttggctataaaatgtggccgggcgcagtggctcacacccgtaatcccagcactttgggaggctgaggcgggtggatcacctgaggtcagcagttcacaaccagcccggccaacatgatgaaaccccgtctctactaaaaatacaaaaaaactagctaggcgtggtggccggcacctgtaatcccagctacttgggaggctgaagcagaagaatcacttgaac

SEQ ID NO: 13355 - DNA, 463 bp, Homo sapiens
tgctacttcccagggactgagctggcgttggtgagggacaggcagaagccatcctaccatgggtccaggcctggcgtgcctcccctccaccagtggcttccccacctctgtgctggggagctcactaattcacatggcactggtagaaaacctggaattgtctgaaagtttcttcttctatttattattatttatttatttatttattttgagacatagtttcgctcttgttgccctaactggcacaatctcactgcaacctccgcctcccgggttcaagggattctcctgccccagcttccagagtagctggaattacaggcatgcgccaccacgctcagctacttttttgtatttttagtagagatgggatttcaccatgttggccaggctgctctcaaactcctgacctcaggtgatccacctacttcggcctcccaaagtgctgggattataggcatgc

SEQ ID NO: 13356 - DNA, 163 bp, Homo sapiens
gaaagttatttttctagttcaatttcataccttgttaatataattcttattaacgatataaccgatcttacaatagagtatggtaaaatcagatgcctccaatgagaacttgctgcagcatcattcctctcttctctctgattctgatttataaaaacttaac

SEQ ID NO: 13357 - DNA, 127 bp, Homo sapiens
cctgggcgacagggtgagactccgtctcaaaaaataaacacataaaaataaaaaaataaaataaagaacattaggtgttctttgaatgaaaaggctggggtgtaaataatgccttgactttgctgct

SEQ ID NO: 13358 - DNA, 464 bp, Homo sapiens
gtttaagatctgggtgctggcatggtccatttctggtgaggtccaccttctaggctgcaaacttctgacttcttgttgtagcctcatgtggtgaagagcagagaggagaaacaagctctctcgttactataatgagggcactaatctcattcatgagagctctgcccttatgacttaatctaatcctcattacctcctgaagtccacagctccttatccatcagggggtaaggtttcaacatatgaattctggggtacacagacattctgttcataacaggtatgtaatgacatttactttctaaatggtatttgaatgttgttttgtttattgaataaccataaaccaaggagttaagggttgcagatgctgtaaaccttatttaacagatgaagcaggctgggtgctgtggctcacgtataatcccagcattttgggtggctgaggcaggcagatcacctga

SEQ ID NO: 13359 - DNA, 364 bp, Homo sapiens
cgacagaagggtacggctgcgagaagacgacagaagggtacggctgcgagaagacgacagaagggtacggctgcgagaagacgacagaagggcagtggctcatgcttgtaatcccagcattttgggaggccaaggcgggcggatcacgaggtcaggagatcgagaccatcctggctgacgcagtgaaaccccgtctctactaaaaatacaaaaaattagccgggcgtggtaacgagcgcctatagtcccagctactcaggaggctgaggcaggagaatggcgtgaacccgggaggcggaggttgcagtgagccgagatagtgccactgcactctggcctgggcgaaagagcgagactccgtctc

SEQ ID NO: 13360 - DNA, 545 bp, Homo sapiens
aggcagggtttcaccatgtgggccaggtgggtctcaaactcctgacctcaggtgatccacctgcctcggcctcccaaagtgctacgattacaggtgtgagacacggcacctggctaataaatttctatcatctataaattacccatgtctaaggtattttgttaccacagcccaaacagacagcatttcatatcagcacatacagaactttctcatttttttctttcactgtgtttagggttgcccgataaaatacaagatgcctacttaaatttgaattatttgcatttccaatacagaaaaagaactttttagtgtaagtttgtcccatgcaatatttgggacatacttatgctagaaagttatttatttatctgaaattcaagccagctgttccgtatttgtatttgttaaatctgaccacccttgttaccttatatgggagctccttattttaaatcactgggggcttcaggaaccaggtgcctggacttggtgggtgtccattctctgactgtattctgaattaggctctagaggctcca

SEQ ID NO: 13361 - DNA, 265 bp, Homo sapiens
agaaagaagggattagaggagcacagaaagtttaaaaaggactgacaatattgtacctcttgagctaagtagtgggtgaatgagtgttcatgttattagtcttgtttaggttgtacatatatcttatgcatgctctttttatgtatgatacatttcacaataaaaataaataaataaataaaatttttatttaaaaaaaaggttgctggccacaaggtcatcatagaaatagtgaaattcctatatataagtaatcacaaattaa

SEQ ID NO: 13362 - DNA, 367 bp, Homo sapiens
ggcacgaggtttaatctctttaactatcaaattgcaattttttttttgccttgcaaataaacaaattacaattgtcatttactggtgagacaatgagaaaaagacaccctcaaacactgttggtagaacacaaattgttaaaatctttctaggagtcattttcaaattatgtatcaatgacctaaaaatatttatgtctcctgttcttatacttccagaaatctattctacagtaataaccggagataaaaacctttacatataaacatgatttattatactgaaaagtcaaaacaacataaatattaaaaataggaggtggtagatttcacctttaaatgctatgtaggagaatacttaagggatt

SEQ ID NO: 13363 - DNA, 300 bp, Homo sapiens
aaaattatcaaaccatcctttgctggcattaaatattcaagttgaagatccttcaccttcctttaatcctatattagagtctataggtgtgtctttcttatagcaatcctgcactcacataaaaactggattttcaatataagatcaaaatgtatttcacaaaaaatgcatctttatatttggttacatttctcctgactgaatggtgccatgtacagtctgtgtaagttatagaaaacgtttgccaactcgtagtctaccattttggtatttggtttctatttggttcgtctggtcttt

SEQ ID NO: 13364 - DNA, 460 bp, Homo sapiens
agcttaacataacctatgagagtggacaggtgtatgtaaatgacttacctgtaaatagtggtgtaacccgaataagctgtcagactttgatagtgaagaatgaaaatcttgaaaatttggaggaaaaagaatattttggaattgtcagtgtaaggattttagttcatgagtggcctatgacatctggttccagtttgcaactaattgtcattcaagaagaggtagtagagattgatggaaaacaagttcagcaaaaggatgtcactgaaattgatattttagttaagaaccggggagtactcagacattcaaactataccctccctttggaagaaagcatgctctactctatttctcgagacagtgacattttatttacccttcctaacctctccaaaaaagaaagtgttagttcactgcaaaccactagccagtatcttatcaggaatgtggaaaccac

SEQ ID NO: 13365 - DNA, 260 bp, Homo sapiens
gttgctgtcacttggatttctagctttgggagcctgttccacctactcagctctgcattgagcagtatgggcacatgccctgtggacagttactggacgttaatgaactcagaggagaaaagcagtgagccacttgttctgtgtgatttatggtacttcattgctcttccttcacctctagtcactttctattgctacctgccctacattggctcctgccaaggtccctctctctccctgttttcctttttttttttttt

SEQ ID NO: 13366 - DNA, 561 bp, Homo sapiens
ggcacgaggccacggcgctcggcctgaattttttttaatacttaatttagatcaataacttcgactggtactgaaatttgcactcactttcagcttacagtttgggtaggactgctagacccagttcttttgtcatctcattcttagagagctcttgaaaaccaaagtatttaaaaccctgcaagtttctgtgcagatgagtgcaaatttccacccagcattggttcctgagtaattagaggaaggaagccatgcaaaagctgctattgcccaggctccagaaaaacatcatgtaaggtttgattccatactaattgttcaaagtgtaaaagaaagctgactgtggcagtttttacctccttttcttttttttccttttaaaaataatccagagacattaagcccaacagtttctctttgcttttttccctctctagcacattttcttgatgagtctaaggtgtgacctctactgaaatggctcccacccaccttctcctatggaagtggatccccagccccatctccttggacctcgtggctgtgtttagaaaattagca

SEQ ID NO: 13367 - DNA, 457 bp, Homo sapiens
ggcacgagctcaacccctgcactgcgctagtcctaaagaggaaatgtctctacgctgcggggatgcagcccgcaccctggggccccgggtatttgggagatatttttgcagcccagtcagaccgttaagctccttgccagataaaaaaaaggaactcctacagaatggaccagaccttcaagattttgtatctggtgatcttgcagacaggagcacctgggatgaatataaaggaaacctaaaacgccagaaaggagaaaggttaagactacctccatggctaaagacagagattcccatggggaaaaattacaataaactgaaaaatactttgcggaatttaaatctccatacagtatgtgaggaagctcgatgtcccaatattggaaagtgttggggaggtggagaatatgccaccgccacagccacgatcatgttgatgggtgacacatgtaca

SEQ ID NO: 13368 - DNA, 455 bp, Homo sapiens
ccactctcggaaccttgtcctgtttgtcccccagctcggcaagcgccatatgagcctggcggcgccagatgcgaatcctgttctgggctttttggcctattcccgcccctcagtcttgccgggatggcaccgcccgcataggacttccagggttgggctgagtgggagttcgactgctgggcctcgtaattctcgctttggggctgctccttccaggctgggacacactggggcccgctgtcggtctcccgtcctccgacatcttgtctggaacttccgcctggcagtctccagtaggagtggagctctgtgcggcgtagtttggtggaaaaacgggccttgcgtcggcctcacccccagtgtttgtgtttcagaatgaagactattctcagcaatcagactgtcgacattccagaaaatgtcgacattactctgaagggacgcacagttatcgt

SEQ ID NO: 13369 - DNA, 185 bp, Homo sapiens
cattgaattaataattcagtggctcctcgggagtcgaatgggcatttgggacaccagaaggaaaagaaatcatcatagtctaaggttcagttgtagatcaaaaaatgcagccaggccgggcacggtggctcacacctgcaatcccagcactttgggaggccaaggcaggcggatcccttacactc

SEQ ID NO: 13370 - DNA, 392 bp, Homo sapiens
cgttgctgtcggtttatccttctgcaccacttgtttcccacctgggacctccagcaagaagcaggtgggcttagagaacttgctgtatttcgggacactgaacgtgtagatggttctggcactgaggcagtggtgttcgctggcagctggctggagagtgatctggactggctggccatggggagtgactggaaatagggtctgtttggaaaagaagcagagagtggcagagctgctgtggggactggtttcacacagccaggacagagtggggttggcagacatggtagggtgcttttttttggttttttctgattttttgtacgggataaggcttggttctgtcacccaggccaaagtgcagcggtgtgagcacagctcactgcagcctg

SEQ ID NO: 13371 - DNA, 525 bp, Homo sapiens
tgtagactttatgtcagttctgtgtagactttatgtcagtttttgtcattatttgaaaatctattctgacaactttttaattcctttgatcttataagttaaagctgtaacaactgaaattgcatggatcaagtaagcatagttttatccagggagaaaaataaaaggaagccatagaattgctctggtcaaaaccaagcacaccatagccttaactgaatatttaggaaatctgcctaatctgcttatatttggtgtttgttttttgactgttgggctttgggaagatgttatttatgaccaatatctgccagtaacgctgtttatctcacttgctttgaaagccaatgggggaaaaaaatccatgaaaaaaaaaagattgataaagtagatgattttgtttgtatccctacccatctcctggcagccctactgagtgaaattgggatacatttggctgtcagaaatataccgagtctactgggtataacatgtctcacttggaaagctagtacttttaaatgg

SEQ ID NO: 13372 - DNA, 439 bp, Homo sapiens
ttcgaattcggcacgagagaagattggggatgaggagtgaggagaatgctggagaccagttagaggctaccgtagcagcgtatagaggctgaaaatctaactagggtggaagcagccaggcaggctggtcctaatgttgggagttgttcagatctggacgagaggtcattacttatagagttattaatttataccccaccttaattgcaaagagattcaaagcagtaagccatcactttagaatttaatgttctgttttcctttttatttactcattcagcagctatttcaatgcctgctgtgtgccaggtgctattcttagtgctttacttgttgtatgtgttatctaatgctgtgtaacaaattactcctgaacttaccaactcacaacaacatttattagctcacagtttctgtggagcatggatctagatgtggc

SEQ ID NO: 13373 - DNA, 422 bp, Homo sapiens
tgtgaaagaaaaagctcagtgatgctgagagtcaattggtgtaacttgatgagccgaaatcccccgcaatggggaaaacagagtcctagaaagatgagagggaaggtgagtcagccagcctagtggggctgttattcctaagctgggttgtatgtcagaatcactcacagcattcttaaaaacacaggcctagcctgtgagactctgaggcagctgttggatttgggccaggacacagtggatctacttttaaaaagctcctggttgggctgggagtggtggctcatgcctgtaatcccaggactttgggaggtggaggtgggtggatcatctgaggtcacgagtttgagaccagcctggcctaaatggtgaaaccccatctctattataaatacaaaaactagctggacgtggtggtgggt

SEQ ID NO: 13374 - DNA, 452 bp, Homo sapiens
cttgtttttccacacagtggagctgtaactgcactaacatggagcaaacagatttccaaagattaagattcagtacaattatgagtggagaatatgacaagtaagttatctggtttactccatgtgaccactataagggaaataattcatcaagtttaatttgaaggtctcaggatgttgaaatcagacttttacatcttaatccactgagaatgaaaaatgaactacttatagtgtctgcccatgacaagtcatttctttgcttatggatgcaaatcgtatcacacagtggtctgaaatattcctttcaaagatataagctgtttgtttttcaaaatggagcttccaggtgtgctaattctgaacacgaagctttgttatttggagaagaatatccttttatggtggtactaaggtagttggcaaatatttactaatgcatactttgtgct

SEQ ID NO: 13375 - DNA, 82 bp, Homo sapiens
tatgttatatgttatgaaaaagtcaatccatcaagaagttagaaaaattataaacatagatgtgtaacagtgtgagccccaa

SEQ ID NO: 13376 - DNA, 574 bp, Homo sapiens
gggggacagagcgagactctcttgaaaaaaaaatacgtatatagaaaagtttaatcgtgggaagtgctgtaaaggaaggcacatgttactctaagagtaaagagcaggggaaacaggagggcttttcagaggaagtgccctttaacatgaggcctgaggagtaagtgggagccagccagcgaagggaagggcattccaggcggagggaacagcctaggcaaaggcctggaggcagagagagccatcagccttccctcctggactgcgagttctctgaggttccacacttttatgtctcccctgtgccctgcaaacaggtgccactgcattgatgcctggtggaatgaattgattccagaagggagggaaccgggagaaaccagctccctggattcctccccgctggggcggagcaggtttgcatgcccaaacttgcccccagatttaagcagctttccttggtcacgtaatcaggaggatgggatttgacaaatgtttgccagggtttccatgagatcaggcaaagccgcgggtaaccccgaggatgggcccctttttccaccctccgcaagtt

SEQ ID NO: 13377 - DNA, 494 bp, Homo sapiens
ggcacgaggggaaaaacggaaaaaactcaagagtgaaaactaagtggtgtgtgaaaatgtcattgtgcctgggtggttgaagtcattaaagtcagagagccaaaaatacctaacagagtggagcgaaaaaagagccggacagaacagtgagaataatatatcactgatgtaaaaacaactcatatgatgcttgtaaatgtggaaactataactatccctggaggggtatagagatgagttcaattaggagggaaactgagtgacaggaggacaaaattggaagggagatttttactgtataactttgtatcttttaaattttgttccaggcgcatttatcatgtattcaatgcatttaaacagaagaggagaaggacgggccataggatagaactattggttaaaaccatcttgtctcaagcccaagctgtcatttgtgaactatgcttcttatggatatctgttgtttgtctgccatttccataccctgcttt

SEQ ID NO: 13378 - DNA, 320 bp, Homo sapiens
ggcacgaggtgagaacggagatacgggaaaacccttggctcatggaagcatagccaacataaaccttttaagcaaaccagcgcaggagttccgtcatagtgcaccatcatcagaaaccagggctcctggtgttccagaagttgccacactttatgttacttcatccacttggtggggaaagcttttgaaatacatcatacatgcatttgtttttaatcagagtgcgttggccatgatgggggtaatttatactgagcacatggcacccatatctggggtttccctcttggtcagggcccccattggccagagcagagtcg

SEQ ID NO: 13379 - DNA, 483 bp, Homo sapiens
cgaggactctttattcctttgcattttctttctcagtctgatctgcttcctgacttcctggaaaccctccaaatttcttgatttctaatggcactctttctagatttctagccctgtacgataatattctttcatcatttcagtgggcttttggagggaggcggagatccaggtgatctgtctacactattcagtcagaaagctggatggtttttctcactgtttagctgtgactcatacttagaaagtggtttaaatgtgaatatcttagttctggttgtacaattgaggtaatcctcaattcaggttgctgtctggacatttcatgactggatttaaaaatatttttaaggccaggtgcggtggctcatgcctgtaatgccggcactttgggaggccgaggcgggtggatcacctggggtcgggagttcaaggccatcctggccaacatgctgaaaccccgtctctactaaaaatacaaag

SEQ ID NO: 13380 - DNA, 536 bp, Homo sapiens
gtctgggcggttgctggcagcgccatggagacggtacagctgatgaacccgccgcgccggcagctgaaaaagttggatgaagatagtttaaccaaacaaccagaagaagtatttgatgtcttagagaaacttggagaaggattactgtagatgcagtatatggaatcaggaatcttaacttcatgtgagctattggagttttccttgctatcaggatgcatagggaggtcctatggcagcgtatacaaagctattcataaagagaccggccagattgttgctattaagcaagttcctgtggaatcagacctccaggagataatcaaagaaatctctataatgcagcaatgtgacagccctcatgtagtcaaatattatggcagttattttaagaacacagacttatggatcgttatggagtactgtggggctggttctgtatctgatatcattcgattacgaaataaaacgttaacagaagatgaaatagctacaatattacaatcaactcttaagggacttgaataccttcattt

SEQ ID NO: 13381 - DNA, 466 bp, Homo sapiens
acgagggggtttcaagaacgtgcctcttgggaaggacgtccgctacttgcacttcctggaaggcacccgggactatgagtggctggaagcactgcttatgaatcagacggtgatgtcaaaaaaccttttctggttcaggcacagaccccaggaagcttttcgggaagccctgcacatggacaggtacctgttgctgcacccagactttctccgatacatgaagaacaggtttctgaggtctaagaccctggatggtgcccactggaggatataccgccccaccactggggccctcctgctgctcactgcccttcagctctgtgaccaggtgagtgcttatggcttcatcactgagggccatgagcgcttttctgatcactactatgatacatcatggaagcggctgatcttttacataaaccatgacttcaagctggagagagaagtctggaagcggctacacgat

SEQ ID NO: 13382 - DNA, 565 bp, Homo sapiens
gatcaataggcggagggaaattgtttctatatgcacttattaaataatttttgttaacaaccctgccctgggataaaagtgaatggaagtacatgactgagtaacagtaattaattctttgccttgttcgtttatttggggactgtatatgctttcttgactgacaatagaatgttgtattacttttcattgtgtctttatttgcagttcacagcacttttgttttgcatatgctacaaactaaaagtttagcaattacgttatattccaattctggagtccagattgtacaaattagatgaaattctaattcgtcattttaggaagaaatcaattacctaaaattactggctcttttcaacataccctttagtatgtaaaaaaataagcttcaaatgcgtgggttaaagttaactatcaatcccagtttaagaatgatatttctgtaagaaaactgctttattttccaagtcgtagtatttaacataggctgagtcacaaataagttttttaattgtatcttaatgcagttgtctctgcctttcaagtcactttgattgaaaca

SEQ ID NO: 13383 - DNA, 227 bp, Homo sapiens
gtgggtggaagaagagcttccaaaagtatctaaagaggatcaatcaagagggtccgtgctcggccgggcgtgttggctcacgccagtaatcccagcactttgggaggccgaggcaggcggatcacgaggccaggagttcgagaccagcctgatcaacaccgtgaaaccctgtctctactaaagatacaaaaaattagccgagtgtggtggtgtgcacctgtaatccc

SEQ ID NO: 13384 - DNA, 444 bp, Homo sapiens
cagtatgcacaatgttgaaacagagttgataaacaaaaggtgactgatgttcactatcatcttttttaggaagtcaagtaagtttgtgatatagtttacagatacttctatcaaatattaaaatgtcttaagatggaaaaaaaaacagttttgacactcaagtaggttttacatattaacatatatagaatgcacatagaagaaagggtcagagaggtccctggaagtgccgtgtactgattcagcatcatgggggctgcacagcctgcactgtgagtaataactataataatagctatcatttaatgagcatttaccatgtgccaggaattaggttaaatctttacatgaattatagtattgagcccttttatccatgccttgagtaggtattattatatctattttaaagataaggaaattgagggccgggcacggaggctc

SEQ ID NO: 13385 - DNA, 615 bp, Homo sapiens
gaaatgcttaatttataagcgggctggagattttttccaatattgttttctttgaaaatgaaaggggatcatctattttagttttggggtctgggaactttttgaaaatttaatttgtggaccaatgttttgtgaaagctaaagagggcaggggttaaaatagggcttgaatttctcattctgtatagaccagcaaacttccctgtgcaaggcaagtttacatcacaaatccaagaatgtttgcatcctaaatgctagtttgcttcagcccctagttaacctcaggacttggtttgcatataaaaggtagacagctgatatgttttcatgaataaatattgtcagccagaaaaggttggtgtcaggtaatgcatatttttttaagctttgttttatatttatttttcatttagtttttattgggaatggttttcaaagaactctcagttctgcctaggtgtttttgggggagccctgttttccatagtgtaattccatttaagaggttgtctaaaagtctttttaattaatagaaagattttaatatccaagagtagtcaaattaaggatataaactttccacaccttcctgtcgtgacagataaaagcacagaa

SEQ ID NO: 13386 - DNA, 565 bp, Homo sapiens
gggagacagcagcaccagcggtggcagagaccccagacatcaagctctttgggaagtggagcaccgatgatgtgcagatcaatgacatttccctgcaggattacattgcagtgaaggagaagtatgccaagtacctgcctcacagtgcagggcggtatgccgccaaacgcttccgcaaagctcagtgtcccattgtggagcgcctcactaactccatgatgatgcacggccgcaacaacggcaagaagctcatgactgtgcgcatcgtcaagcatgccttcgagatcatacacctgctcacaggcgagaaccctctgcaggtcctggtgaacgccatcatcaacagtggtccccgggaggactccacacgcattgggcgcgccgggactgtgagacgacaggctgtggatgtgtcccccctgcgccgtgtgaaccaggccatctggctgctgtgcacaggcgctcgtgaggctgccttccggaacattaagaccattgctgagtgcctggcagatgagctcatcaatgctgccaagggctcctcgaactcctatgccattaagaa

SEQ ID NO: 13387 - DNA, 200 bp, Homo sapiens
ggcacgagcagccttggtgacagagcgagaccctgtctctaaaaaataaataaataaaatattgtgagtctctgatggggagcagtattgcatggtggttgagaactgaggctctgatgttagaactggattctgacttaacccactgtttgcccacatcttgagccttggtttccctatctgtaaaatggcagtattct

SEQ ID NO: 13388 - DNA, 93 bp, Homo sapiens
agcccaggtttttaataagatgaaaaaaatgctgttataaaaagtgaaaagaggccaggtgtggtggctcctgcctgtggtcccagctactcc

SEQ ID NO: 13389 - DNA, 300 bp, Homo sapiens
caagaagaaacatggcggctatccttctctcacatcgaaaaggaaattttgaacaatcatggaaaatctaaaacgtgctgtgaaaacaaagaagagaaatgttgcaggaaagattgtttaaaactaatgaaataccttttagaacagctgaaagaaaggtttaaagacaaaaaacatctggataaattctcttcttatcatgtgaaaactgccttctttcacgtatgtacccagaaccctcaagacagtcagtgggaccgcaaagacctgggcctctgctttgataactgcgtgacatac

SEQ ID NO: 13390 - DNA, 530 bp, Homo sapiens
tgacgtgaaatgtaaactagtaggcgtgttattgatctgctaaaactaaccctctttttaagaggagatttaaggaagacgtcaatcaaaatgtcaaatatgtgtgtcagaatataaataatttttcacattgtattgttgctatataaaaaaaataatagaattggttgggtttctgaggtgaaatccagagtaagagtactagacagttcaacaagccacatctaatggcacagatagaggatgtagctattttatacctttcataacatttgagagtaagatatccttcaggatgtgaagtgattattaagtactcatacctgaaatctgttgtcaagattagaactggggttcatgttaaaaaccttccatattacctgagggtacctgtggggaacagttccttcccctgtgtggtagtattttgttggaagagaatgtttatacaaaaaatgaaattcttccaacagcagagaaactctaaaaagtttgatagtacctatcaaagtgctgtacttctgtgatag

SEQ ID NO: 13391 - DNA, 197 bp, Homo sapiens
  misc_feature 197: n = A,T,C or G
acgacagaagggtacggctgcgagaagacgacagaagggaactggagcctcatctctcaatttatgcaaaaatcaactctaggtgaatcaaggatttaaatctaagacatgaaactataaaagttctagaaaataacatcagaaaaattcttgtagacattggcttaagcaaagatttcatgacaaagaaccaaaan

SEQ ID NO: 13392 - DNA, 214 bp, Homo sapiens
atcactgttctgcttggttttaaaaaattcaaaggccaggcgcagtggctcacacctgtaatcccaacactttgggaagctgaggcaggtgggatcacctgaggtcaggagttcgagaccaacctggccaacatggtgaaatcccatctctactaaaaatacgaaaattagcccggcgtgatggcgggcacctgtaatcccactacctgggaac

SEQ ID NO: 13393 - DNA, 521 bp, Homo sapiens
agacacactgaagcattgcatttgaatcataattatgaaccatttaaaaattggggatttattttttaattatgaaaaattctgttgtaatagtaccacatccaatttatatgttattagctgtttgttacccactatttcattatattggaatgagggcaaataatcctgtaggcaagcacgatattttaaaagttaggaattctgacacatctcaacttttaaatctaatagattgatatgctgctgaaagaatatttactctctggagacatatctgaagctgaacattgccttaaggaactggaagtacctcattttcaccatgagcttgtatatgaagctattataatggttttagagtcaactggagaaagtacatttaagatgattttggatttattaaagtccctttggaagtcttctaccattactgtagaccaaatgaaaagaggttatgagagaatttacaatgaaattccggacattaatctggatgtcccacattcatactctgtgct

SEQ ID NO: 13394 - DNA, 358 bp, Homo sapiens
tctagactctggtcgtcaggaacgggtcaaggccttcaccatgagaagagcaccaaagggagttaatatggggttgaccagaggtaggcaaaggaaggcctgtgggccaaatctggccagctacctgtttttataaataaagttttattggaacacaaccatgctggggtttgattcatatttcctgaggctgttttcacactgcaatggcagaggtgagtggttgacacagatgccgtctcaccaaagcctatgatatttactgtctggccctatacagaaaaagcttgctgacctctgggttagactgtcaggtggtagagactaaggagggagtgataagtccctgttggccacc

SEQ ID NO: 13395 - DNA, 135 bp, Homo sapiens
cctctgggctcccgggcccggccagatgggccagctccacagggccctcgcccctgtctgtggcaggattcccaaggccgcccctgcctggctctcccaccttccccaggaccctcttcctctcgtgtctggctt

SEQ ID NO: 13396 - DNA, 612 bp, Homo sapiens
gtgtatataattacatatcccagagccagagaggattagaagtgctacagaagtgaatgtcaggcaatatgatattccacaggtgtgaaagtagcgtttctacagagttggccaacactctctaaatcaaaaatatctgctgccgaatggggggagaaagaaagtgaagtgaatcataaactagagtcaaatgggataggagagacagtacagagtagtcagcccagcagatcatacaaacctgactgcccacaccttgctccaaaggttgagtcctttatcaaagggacgtgtgatttaaattgaaataatacgtttaaaaaaaatgattttaggcccggcgtggtggctcacgcctgtaatcccaacactttgggaggctgacgcgggcagatcacaaggtcaggagatggagaccatcctggctaacacggttaaactccgtctctaccaaaaaatacaaaaaaaaatagcagggcgtggtggcaggcacctgtagtcccagctactcgggaggctgaggcaggaggatggcgtgaacctgggaggcggagcttgcactgagccgagatcacaccactgcactccagcctgagtgacagagcgagactc

SEQ ID NO: 13397 - DNA, 543 bp, Homo sapiens
ttttttacctcttcataatgtctaacacaatgatggtcatatttggccagccacctgattattatttgttgatttatggacttttggaacttctagatgatccagatcttttgtagttaattactcactttggggaaactctaaaaaaaacaagtgtttattgagcatctattatgtataagccataatgctaggtgctagagaagctacaaagatgcaaaagacatgggagtgcctgcccttagggagttcacattctagttgggaagataggcttgaaaaatgagtagcaaggaaaggcttaagtgacaactacgtagaacaataaaagagacatcaaaaaggtaatgtcagtttaacggccaaatgatttttctacatgcattcagacaagagaaagatcccttctgttgggagcaatcaagaaaggttttgcagagaaggtgggatttgagccgaaagaaaattaggatatgaggagggtaagaaagagtgtattccaagtgagaaacaggctcacttggtgggaaagagtggtgggaa

SEQ ID NO: 13398 - DNA, 577 bp, Homo sapiens
agccttctaactggtcaagtcgaatgtgactccagaggaagagcacaggactgtgagtcgaggtcacggtctaatccaagttctgctaccaagaaaatgaacctgaacaagtcacttaaactttctatgtttccagtcttttatgggggaaatgaaggtaataatacctgccttctacctacctcatgggaatgttgttgagtataaaagataagctatatgaagcattttgagctttttggaagaaaagagatatggaaaagttaattatacatttacgtaaacttaatatataaaagaggagaccttggctgggcatggtggctcacgcctgtaatcctagcactttgggaggccgaggcgggcagatcacctgaggtccagagtttgagaccagcctgaccaacagggagaaaacccgtctgtactaaaaatacaaaaattagctgggcatggcggcacacgactgtaataccagctattcgggaggctgaggcaggagaatcacttgaacccgggacgcggaggttgtggtgagctgacattgcaccagtgcgctctagcctgggcaacaaga

SEQ ID NO: 13399 - DNA, 569 bp, Homo sapiens
atggcacttaagatttcaataagttgagaagtatagtatgacagttaagactaaaagagtaaaagtgtccacttcagtcagagccccaacagtgttttgacaagttgatcttaaaattatactgaagggcaaggaccacgaatcagctataattctgtaaaagaagaaggatgatccatactaccaggtatcaatgcttatttcaggctagataattaaggcataagatatttactgatgcaaggaaagacagatacagcaatgggacaaatacatgagctcagaaattaatccaaagcatataaagaaatgtgatattacaggaataatcatagaaatcaataaattaaaaatgggctatttagggccgggcgcggtggctcacgcctgtaattccagcactttgggaggccgaggtgggcggatcaccaggtcaggagatcaagaccatcctggctaacacgatgaaatcccatctctactaaaatacaaaaaattagccgggcgtggtggcgggcgcctgtagtcccatctattcgggaggctgaggcaggagaacggtgtgaacc

SEQ ID NO: 13400 - DNA, 601 bp, Homo sapiens
agtgctgggattacaggtgtgagccaccacgcctggcaggatttggaaatatttttgctgcttgctgattccacctaacctcctcttttctgacccacgcctccaacacacatatatctaagattctggatactggtaattaatcaccatggtaattagaagtgtttagcagacaactctttgatgcatcaaacaattttagtgagagagatgtactttctgtattggtttagagtatacaagtgccaatttcctacagcaaataatttattcacataatttggctgcataaaaactaccatatgtaaagtggtacagccactgtagaagacagcctggcagttcctcaaaaaattaaacatagaattaccatatgattcagcaattccacttctcagaatatactcaaaagaattgacaccaagaacgtgaacagatatttgacaccagtgttcatagcagcattattcacaatagcaaaaatgtggaaacaacccaaatgttcatcacctgatgaatggataacaaaatgtggtatacacatacaatggaatattatttactcacaaaaggagtgatattctgatacatgctacaacat

SEQ ID NO: 13401 - DNA, 94 bp, Homo sapiens
cctttagccacactagatgctacctctaactctagctaaaagactgactctgactattcctcactatgctacattctgaatgtaattacaaaac

SEQ ID NO: 13402 - DNA, 300 bp, Homo sapiens
cccaagcaaggttccttggaagaagatgtctgcagaggagctggagaatcagtactgtcccagccgatgggttgtccgactgggagcagaggaagccttgaggacctactcacagataggaattgaagattatcttgaaaacaatcttccagtagttctgacgatacttggagcctggtccacgtgcatcccaccttgggaagcctctccaaagagctttcggagctgacactgacagcttcagtttcccccagcacccaggagagccttgctgtgtctgtctgcccggcaagagtccat

SEQ ID NO: 13403 - DNA, 548 bp, Homo sapiens
ggcacgagcttagttccacaaataattattgatttgtttaagcgtgatgtatgtgcttgctcaaggaattagaagatgagtatgacaaagctcattccctcagggagttgagtgtttcagagggatgaagtaaaagaagattttaaaactacaagtagagtgtaagaagtatcacgagaaacatcaacaaagggctgaggatagaaggtgataagtctcaagtatctcaagatattcagcagtgaatcttaacataaatttgcttttaggggaagaatttcaagcatattgataggtcttaaattttctagtctctctgggatagtaggaaggagaatgatttttaaaaagttgattatgtagcatggagtttggggactagtaaaaattttattgaaattatttgggaattgttttacagttgtttttagtggaggttgtatttctgaaaatattgcattttagtgtgatgatttactaaagaagtagcagggacttattctaaggtaggagatagaaaaactaataagtaaaaatctgctagcaac

SEQ ID NO: 13404 - DNA, 226 bp, Homo sapiens
ggcacgaggcagaaccttttcccctctactcttgtctaaaagttctgtgtggcacacagagatgcgacctactcaatctgacttagtaaaaccatgctgtagaatttttgtcttaaaaagaccacatacccagcacccatgaaataaaagattcatctgtaattgggattcaaagtgattaaattcctttgttcatactcataaatagcactaaagtgttataaca

SEQ ID NO: 13405 - DNA, 395 bp, Homo sapiens
  misc_feature 395: n = A,T,C or G
cgttgctgtcgattcgctgccccgagtcgggcgagcactatgaagtcacgttgctgcactttctacaggaatacctctgagcctgcccaccgggagccgccacatcacagcacaagtggctgcagcctccgcggggaaccaggcgggagggactgagtggcccgcgggccccagtgaggcactttgtcccgcccagcgctggccagccccgaggagccgctgccttcaccgccccgacgccttttatccttttttaaacgctcttgggttttatgtccgctgcttcttggttgccgagacagagagatggtggtctcgggccagcccctcctctccccgccttctgggaggaggaggtcacacgctgatgggcactggagaggccagaagagacn

SEQ ID NO: 13406 - DNA, 79 bp, Homo sapiens
tcggaaatggaacattttcatgattgcagtttgaaatatgctatacaggagtcaacgctgcacaacatggacaaaacta

SEQ ID NO: 13407 - DNA, 138 bp, Homo sapiens
aggaagagcagaaatggggaatatttggaagcggaggctgctggacacagagacctcctgttgggggtagtacgtggagacagaaccctgcttctgggcatcctggggtagtactcacaggggcagggggcccaggca

SEQ ID NO: 13408 - DNA, 347 bp, Homo sapiens
  misc_feature 261: n = A,T,C or G
ggcacgaggaaaaggccccagaatgggctggcttgaactggaaaaacacactttctcatcccttttggaccacgagcttcttgagagcaaagcatgtgtttgatattcctttgctcaccctcaggccttgtttggcaaattgcctgggatacagaaaataaggacaaggtctgggtgtagtggcttatgcctgtaatcccagcactttgggtgaccaaggcaggaggatctcttgaggccaggagttgcagaccagcctgngtaacatagtgagaccttgtctctgcaacaaaatttaaaaattagccagacttggtggttcccacttgcaatcccagctatttggg

SEQ ID NO: 13409 - DNA, 644 bp, Homo sapiens
ttgactcgcttgcttccctagttcttaatcacaggctcaggggactctcagcacctctccttcctccaggtaagtagaagcctgtaccacgtcgtaggtggctccttgggtcgggaagcaggtgctgccagcccgggacgcctcccaggggacattagctaccttgcgggagagcctgcgtgtctggttggtgtgcggagaaacattgtcatctagtggaagaaatagcaacgctctcatctcttttcttagctaatggcgtgtaaccatggattggatgtttacagagccatctcactgttgggctgatcacattgaaactttcctgggaaaagttcttatcatcttcttcctaccttaaattttgtacttcagtaaatttaaagaaatacaattgggcacttcaggccgggcgcggtggctcacgcttgtaatcccagcactttgggaggccgaggcgggcggatcacgaagtcaggagattgagaccatcctgcctaacactgtgaaaccccgtctctactaaaaatacaaaaaaattagccgggcgtgctggcgggcgcctgtagtcccagctactgggaaagctgaggcaggagaatggtgtgaacccgggaggcggagcttgcagtgagccgagatcg

SEQ ID NO: 13410 - DNA, 542 bp, Homo sapiens
gcagcgtgatcatgggaataccgcttaacctcaaatccttggctttctctgtaaagtaaatgtaataagatctccacagggtttgctgtgagggttgaacgagctcagtgcacatgaaaatgccctatacactcgaaaccagctataaatattggttattattgttaggatgctgacgttcaaatataaattgccaaaatcatttgggaagcattgcatactccattcccacatggagagttgcagggcatgtgattatctgtttgttcatttagtcacaatattgatcaatatagaacaaagcagtatattttaaaaatcaaccaggagcagccattctttgaagtgttatgcaaccattaaaaattaggtttggccaggcgcggtggctcaagcctgtaatcccagcactttgggaggccgaggcaggcagatcacctgaggtcaggagttcgggactagcctggccaacatagtgaagccttgtccttactaaaaatataaaaatcaggcgtggtggcaggtgcctgtagtcccagcta

SEQ ID NO: 13411 - DNA, 509 bp, Homo sapiens
atagtgttaaagtctgtatactcttctcatacacatagattcatgtttatattgatgaaaaagtatttctaataaaacttagcatttttgtgtttgaaaaatatgacttttaatgatagttagtgatttatcagtaatacaaatatccttctctcgtgtaattagtggagacaagtctcaagctgagaattgttaagtgtcagtgcttgcttaattggggcaattttcacttatttgaaaaatacatactaataccatttgttaaatgatcagaacttgctctcattgaaaaagaaaggtagaggccgggcgtggtggctcatgcctgtaatcccagcactttgggaggctgaggcgggtggatcacaaggtcaggagatcgagaccattctggctaacacggtgaaaccccgtctctactaaaaatacaaaaattagctaggcttggtggcaggcgcctgtagtcccagctgctggggaggctgaggcaggagaatggcatgaacccg

SEQ ID NO: 13412 - DNA, 384 bp, Homo sapiens
acgcctggctaatttttgtattgttagtagagacggggtttcactgtgttagccaggatggtctcaatctcctgacctcgtgatccacccacctcggcctcccaaagtgctgggattacggctggagccaccgcgcctggccgctaatttttgtagttttggtagagacagggtttcaccacgttgcccaggctggtctcaaacctctgagctcaattgatgcacccgcctcggcctcccaaagtgctgagattacagagacgtgagccaccatgcctggctgtaatcagttttaaaatagaaagaatttggggcaaaaacactttctagttgttgctcagcaaggtcaatgagtggtcggcacagaatagctcctgtcatctg

SEQ ID NO: 13413 - DNA, 200 bp, Homo sapiens
tcgctatctcccatacctgatctggggaaactcactgaggtgacatttaaaaagatgagggagtaggccgggcgcagtggctcatgcctgtaatcccatcactttgggaggccaaggtgggtggatcacctgaggtcagaagttcgagaccaccctgaccaatatggtgaaaccgtacctctactaaaaatacaaaaatt

SEQ ID NO: 13414 - DNA, 594 bp, Homo sapiens
ttctatgcagagttttccccattctctggaaattctcattttaggaaccttacttctgttccctgggaaccccagtcccatccctttaagcaatatgaaacaccctgtctgtggatcaaattccagggagacttctgggcaaaaattcttttgccccatgacctgatatctttggtcatgcctcctggaggcacaagtccccaccacagggccgcctaccacatgtatctgatggctgaaattaagggcagcagggcagaaagcggatctgctgacaccacagttagacaagcttgcaccaaggctgtaaaacacccttggcagagcacaccagtaagttgtcctactaattagtttattatttcatttgagagatcaaatacataaataaaattaataaaccctgcaaaatacgtgcagcactggaaataaaagtacttctcaggtcattgcattaaacacagatattacatgctagaataatgttaacgcaaggaaagcaaatcatgctgccttataggccggaacgtaccaggagcagctggggtttgtggagtggttgacaagctttgggataggtcaggaaacatgaat

SEQ ID NO: 13415 - DNA, 532 bp, Homo sapiens
gtggtccggggatggcagtgggaccctgcagaggagtggctctcttggcaagatccgggatgtgctccgcagaagcagtgaactcttggtgaggaagctccaggggactgagcctcggccctccagcagcaacatgaagcgagcagcctccttgaactatctgaaccaacctagtgcagcacccctccaggtctcccggggcctcagtgccagcaccatggacctctcttcaagcagctgacattcaacccggcccccaggtctgctgggtccccccacccccacagccctcacagcattccccattgctcctggctcttccccacccctaggtgggacagtgaaggggagcagtttaaccagaagattgctgctgcccttagggtctcagctccctcctcaggaatccctcttaggaaggaccctcaggacaccctctctgcaccctgtggtcctctagagtagctagctctgaggccccaaggtgggtacaaagcaggtatggccctcagagatgcagcctgctgctggc

SEQ ID NO: 13416 - DNA, 437 bp, Homo sapiens
gtctgggcttgtctagcagtggaattctgcctgagttcatcatttttgtgactggtacttgaagtgcatcagatgattaatttcatgataagagggctttttggggtggtgaaatagacatttatggaaaatgggatacccacattaagcagggtgactacctgtttaccatacaacccacacaaagccaatacaactatagatgtgctttatttagtctgttgcctctgcaaacattgcccgtgtgtttctctatgcccttcaaaaacatcagagcagcacatcctggaagatcctatcttttgtaagtttaagaagcagcctcttgtcacaggttgactcctaggtagtgtgcctagtgaccaagagggctgctaagaaagctttctgaccacttgtggctgtcattggactgatttgcccagatgacatcaatt

SEQ ID NO: 13417 - DNA, 197 bp, Homo sapiens
ggagcagaatagagctgcagtcagcagggagcagggctcattctggggagcagagacaaatagagaacagtatctcttgctatatgcagggcactgcaacttacaaatcacagcgcatggcgaggacgagggttggggtggtacctctcaccatgtctccagctgttccaacccgtggtcaatgggagctctgatgc

SEQ ID NO: 13418 - DNA, 300 bp, Homo sapiens
aatacctttaaatccctgggcagcaccgcagggacagatattaccgtcaacagtgtgattctacttcctaaaaaccctgagcactttgtggtgtgcaacagatcaaacacggtggtcatcatgaacatgcaggggcagattgtcagaagcttcagttctggtaaaagagaaggtggggactttgtttgctgtgccctctctccccgtggtgaatggatctactgtgtaggggaggactttgtgctctactgtttcagtacagtcactggcaaactggagagaactttgacagtgcacgag

SEQ ID NO: 13419 - DNA, 293 bp, Homo sapiens
ggccagccagctgctcacactggacaccacctctatccccctgcgcctctgccctgtcgcctcctgcccggacgcccgcctgctggccggctgcgagggcggctgctgctgctgggacgtgcggctggaccagccccaaaagaggagggtgtgtgaagtggaattcatcttctctgagggctccgaggcatctggacggagagtggatgggctggcatttgtgaatgaggacatcgtggcctccaaggggagcggcctggtcaccatctgcctgtggagctggaggcagacgt

SEQ ID NO: 13420 - DNA, 109 bp, Homo sapiens
ggcacgaggtggccagagtggagaggatgtgcagaaaggggcaggagatgaaggttggcagcagctggtcatgaaggtgttaacaaggggcctccactgggctgtgcgg

SEQ ID NO: 13421 - DNA, 561 bp, Homo sapiens
ggcacgagaatatatcacatcatgtaataagcctctcagagatgtagcattgagcagattaaggcctcatttatagaagaattccaccctggccatgtgggcctgaaactctggagggctttaacaatgtcttgaggtcattgtcatttaaagagatgactcagtggttttatttagtagaaataaatactaaataaataatctccacagattatccagaggggtaagttgaaggatgttgacagataactcagtaaattgcgtctcaaatattaataagtttattctatgccagcaccaaaaatatttcagagatgcttttaggcttctctcaagtatgtcgggaacagaaaaggattatagaaatatttatagtaggcataaacttgcacaaaagctcaaagtaccttaagcaagcttgttgcaattattcttttggagaactggattaagtaattatttcttgttgcctctgactatttaacctcctactaaactgcccattgtttaaatgtctcttatttagctctgtttttatcactccttaaatttaatattctc

SEQ ID NO: 13422 - DNA, 405 bp, Homo sapiens
agttacacaatagtgtgttccccattggtaggacagtctactactgagtcctcctggcatgagtcgagctgagattaggatagggtaatgacccttcagttttggggaagggaccagagctcggccagtgagaagcttccagctccgtctggccatatccaggctgctgagggtcctgggctctgtccttaaacctcatcactgacatgacccagcaaacctcctcaagaggaaaaagtccccttgggtcaaacacagcttgtgcagttctcggggacctcctcctgccatcctggggatgctgtggagaatggagatgcacagggggctttgtcctctcctctgccttttggagaaaatatttcactcaaggcaaacgcagcctgagggcagcacaggggaccc

SEQ ID NO: 13423 - DNA, 514 bp, Homo sapiens
ggcacgaggttggttgtcaactttgcattataccacccacttgtaatatctctgccttgaagaggaaaaaccaggaacatttcctagaatccccttcccgttatgatcccaagttaggatatgccagtgagaggtgctgttttagtcccttttgcctgctgtgacaaaatgacacagactgggtagcttataaacaacagaaatttatttcccacacttctggaggctggaaagtccaagatcagggtattggtagattctgtgtctggtgagggctcattttctgattcatcgatggcaccttctcaggggtcctcacatgcggaattgataacgcagatctctgggatctcttttataagggcactaatcccattcatgagggttctgccttcataatctaaccacctatcaaaggccccatttctagtaccgttaccttaggggttaggatttcaacatgacctctggggagatacattcagcccatagcaggtactcacaatagaataag

SEQ ID NO: 13424 - DNA, 295 bp, Homo sapiens
gcctcaggaggagctcaaagaggagcagacagccatggttcctccagccatccctcttcggcgctgcagatactgcctggtgctgcagcccctgagggctcggcactgccgtgagtgccgccgttgcgtccgccgctacgaccaccactgcccctggatggagaactgtgtgggagagcgcaaccacccactctttgtggtctacctggcgctgcagctggtggtgcttctgtggggcctgtacctggcatggtcaggcctccggttcttccagccctggggtctgtggttgtgg

SEQ ID NO: 13425 - DNA, 424 bp, Homo sapiens
cattgttacaagtaagcagctttattggttcttttacttacgtctttaaatatatggagcaacagtacggtcagtctgcatctcatgctaactttttgttgggaatcataaccattcctacggttgcaactggaatgtttttaggaggatttatcattaaaaaattcaaattgtctttagttggaattgccaaattttcatttcttacttcgatgatatccttcttgtttcaacttctatatttccctctaatctgcgaaagcaaatcagttgccggcctaaccttgacctatgatggaaataattcagtggcatctcatgtagatgtaccactttcttattgcaactcagagtgcaattgtgatgaaagtcagtgggaaccagtctgtgggaacaatggaataacttacctgtcaccttgtct

SEQ ID NO: 13426 - DNA, 605 bp, Homo sapiens
ggtgggttatacctgtcttgcagccatccgagatcacgcttctgtcttgtctttctcgagaagcaggtggaaacatgagcattcagtttcttggtacagtgtacaaggtgaatatcttaaccagacttgccgcagaatttaacaaatttatgctggaaaaagtgactgaggacacaagcagtgttctgcgttccccgatgcccggagtggtggtggccgtctctgtcaagcctggagacgcggtagcagaaggtcaagaaatttgtgtgattgaagccatgaaaatgcagaatagtatgacagctgggaaaactggcacggtgaaatctgtgcactgtcaagctggagacacagttggagaaggggatctgctcgtggagctggaatgaaggatttataacctttcagtcatcacccaatttaattagccatttgcatgatgctttcacacacaattgattcaagcattatacaggaacacccctgtgcagctacgtttacgtcgtcatttattccacagagtcaagaccaatattctgccaaaaaatcaccaatggaaattttcattgatataaatacttgtacatatgatttgtacttctgct

SEQ ID NO: 13427 - DNA, 486 bp, Homo sapiens
gtggaaacatgttgccaagtcagatcgccattctacttgagtgaatatggaatttgtccagttttccaaatgcagagctttttgtgggctgatggactgaatagaaagaggaacaaccatacacccttctacagatgaaggcaagattttatgaaagcgacttcattcgttctcctctgcctggtgttccttctttgtaaaccaggaccagggagctttgaatatagcagtatattatagaatttggtttcattaaatattatacctgcccttagtgtttatattccagtatattgacaacccaggtcctctctgtacctgtgattgtctgtgttgagactattacagagctccaaaaattaaaataaaaataataattttacagaaatacatatttgcattggaatatttaagaaagttgagtttggatgccacaagattataggagtaataggaagctgggcacagtggctcacacctgtaatc

SEQ ID NO: 13428 - DNA, 534 bp, Homo sapiens
gcctcatttaaccagcactgacagcacatgggcgtttcacagaatttaacttaccaaatagcctaaagttatctttccttataaagttaaaacattttcatgggcagtttttcaaaatgtatgcaattcttccttgcttttttgcatgtagcaggcattgcttgattaaactttatgttggatgacttaaccttttcataatgactcaatgtcatcattacaaaaattaattattactctgggttataatacagtattgttctcaggagtttttgaggtttggaaagatatttatcttactaaaagctctagagtgctatgattcttcttattagaaggatgagggtaaagaaggggtctaaactgaatactcagttcccatggctctgattttagaggtcattatgtaattctcagacacctaagttttgaggctatccctggaagaaactaccctaaagtgggagagaacagaaagatctctttgagcacagaggacatctactgaagcccaaataattttatactatcagc

SEQ ID NO: 13429 - DNA, 309 bp, Homo sapiens
caaccttgacaaatagaattataggagcttacatgttctgattgatagatgagcagactttacaataaaaattataaaaggtagatagatattttatgcttgcattagaaaatatgtaggccaaccaggcagtggctcatgcctgtaatcccaacactttgggaggccaaggtgggcggatcacttgaggttgggagttcaagaccagcctggccaaattggtgaaaccccatctctactaaaaatacaaacattagccgggcatggtgacagccgcctgtagtcccagctactcgggaggctgaggca

SEQ ID NO: 13430 - DNA, 410 bp, Homo sapiens
ggcacgagctctgattccttcaacgaggacatcgctgcctttgccaagcaggttcgctctgagaggcccctcttctcctccaacccagaactggacaatctgatgatccaggccatccaggtgctgcggttccacctgctggagctggagaaggtccacgacctgtgcgacaacttctgtcaccgctacatcacctgcctcaagggaaagatgcccatcgacctggtcatcgaggatcgggacggcggctgcagggaggacttcgaggactacccagcctcctgccccagcctcccagaccagaataatatgtggattcgagaccatgaggatagtgggtctgtacatttggggaccccaggtccatccagtgggggcctggcctcccagagaggggacaactccagtga

SEQ ID NO: 13431 - DNA, 458 bp, Homo sapiens
ggcacgaggcaaagcctcgcggcgaggaaagcacgagtattcaagcgcggctgaggccctccttggctagtgctgggacatggagccccggcagccaaggccaaccttgtgcattccgcccacgtaggcgcctggggccctggtcttcctcgactgcctctccactgcctggaggtcatcaaatgcccctggaccacctcctacgtgccacacgctgtgttggccatccaaggttccatattgagcataaaacagccctctgccctaaaggagttaacctgttggaatcacatacaaaggattctgactaccaagcgccttgaagttaagttgaactctgaagacagattgcctggctacaaagctcagttccactacatatggtccaggaacttaagacaaattattttaatgtctttatgtttcactatccgctgtagtgaaatagaataatacct

SEQ ID NO: 13432 - DNA, 459 bp, Homo sapiens
ctccccaatgaggaccccctctggacgccccttcccatggagaacaccaggagccacagaccccagaccacagagcacacaggggagggcacggggcggccggggcagggtgtctgctgcctcgtttatgggatttgctccgcgtctagcacactgctgcctgcagtgctcctgtcccctgcagtggctactctgggcctacgggcctaatcctggttggcatgaaaatgtcctgaggctactgtgacaaatttccacaagctgagtggcttaaaggaacacatttgttctcttacagttgcaggggccataagagtctaaaaacagtcagcagggctggttcctcctggaggcttagaggggctgaatccgtttcctgccttttttagtatctggagggcgcctgcatacccttgcttatggccccttccatcaccaaagccagtagtgtcacatctt

SEQ ID NO: 13433 - DNA, 337 bp, Homo sapiens
agcgcctctgcccggctgttttttctgggaggtgaggagcgcctctgcccggccaccaccccatctgggaggcgaggagcgcctctgcccggccgccaccccatctgggatgtgaggagcgcctctgccagccgccccgtctgagaagtgaggagagcctttgcccggccgccaccccgtctgggatgtgagaagcgcctttgcccagccgccacgactgggaagtgaggagcgcctctgcccagccgccaccccatctgggaggtgaggagcgcctctgcccggccgccccgtctgggaggtggggagcacctctgcctggccgcccatcatctgg

SEQ ID NO: 13434 - DNA, 462 bp, Homo sapiens
atagttaattgtagttaaaagtacgagataaaaaagaaacaattcggtatacggagcatattaagtgagatacggacagaaagagggacacaacagaagcaggtaagagctgctgccctgtctgtatccatgactgtggtgaacttgcccaccagaagaatatgaaaaagcagagtgacttggttaaggggaaagcaccaagatgatgggctttctgttgcctcctgcaagcagagggacttggagaccattcagcagaagcagaaaaaggcaaatgagaaggagaacccaggccgggcatggtggctcacgcctgtaatcccagcactttgggagggcgaggcaagtggattacctgaggtcaggagttcaagaccagcctggccaacatggcaaaacctcatctctactaaaaatacaaaaaaaaattagccaggtatggtggcacacgcctgtaatccc

SEQ ID NO: 13435 - DNA, 608 bp, Homo sapiens
ggcttcttgggtaccagattcccacttagcaatctgccaaatagtcttctttctcggatgcaggtgatgccaagatccagtcccaagcagagagacctaaagctggcttttaattataaggcccatgatggtttgttgtgacttagactataagcattctgagacaggttccaagacctggggaaatcatcattaaacaaacaaagaggcaagacttgtgcaggactcatatcagaggacataaggagggagaagaagggatgagaatctttcctaaataatgcactgcttcttcaagacccatgcctgagacaaacaggattattaagttgggaaactagcctgtttcacctctctctaattagaactccctacacctcccaaacaagagaagggaaagcaactctgttttctgtccatgtctgcccagccagggaaagaatattaagtctcagagcaagggtcgggcacggtggctcacgcctgtaatcccagcactttgggaggccaaggcaggcagacgatctgaggtcaggagtttgagaccagcctgatcctaaaaatacaaaaattagccaggcatggtagcaggcgcctgtaatctcagc

SEQ ID NO: 13436 - DNA, 510 bp, Homo sapiens
taatatctggcatataataagcactatatacatgttacctactggctagaattcatttgattctcacagcaaccttatgaggtagggtactatcattatatctacctgttttacagatttggaaactgaacaagcagaaggcagccaaagaggcagagagggcaaattctgagacaagttctttcccctgcccgggttccagttctgaacaggaacatgggtctggcctatactggacacggactaaggctgggggaagcatagatagtctgacccaccagatctcactgtgtcattctcctccaagctctgggcccctggccccaagtagcacttgggtgctgctccaggggacaggtgaagggccactagtgggaaaacatgcatctaaaagtcaggagatctgggactgagtcccaactcggctactaactagccctgtgatttcaggaataggtcagtcactcattttgaaaatatttgttgagcacctactatgtgccaggcatt

SEQ ID NO: 13437 - DNA, 468 bp, Homo sapiens
ggtattatctactaaagatgaatcaagagtgcaaaataaccaaaatcaaattcaccagccccagctaagtgaaggttattcagtacttttagaataactgacacagaggcagtgattcatcttgtcttccccacccgcctgtttttgagatggggcctcactgcagtagctcaggctcgagtgcagtggtgtgatctcggctgaggctcgagtgcagtggtgtgatctcggctcactgcaacctctacctgccaggctcaggcgatcctcctgcctcagcctcccgagtagctgggactacaggcgcacaccactatgcccagctactttttttgtctttttttagtagagacagggtttcgccatgttacccaggctggtctcgaactcctgaacttgagcaatcctcccacctcatcttcctgaagtgctgggattataggccagccttttttttttttttttttt

SEQ ID NO: 13438 - DNA, 498 bp, Homo sapiens
actcgccgacatctcacgtctcttggctttgccagggcccaccggagaaaactgacgacccgtttctgtaatccttatgggagaccaaccttgtgcctccgggagatccactctcccacctggaaacgcacgggaagccaagcctccaaaaaagcgctgcctcctcgctccgcgttgggattatccggaaggaactcccaacggaggtagtaccactctaccctccgcacctcctcctgcatcagccggcctgaagtcgcaccctcctcctccggagaagtagagaaataaatttctcccaccctaaaccagtctttgagtgattgcagtatgactccatttccctggtgcattcatataatagttcacctggtgaaaacaatgaagattatttacaatgctaccctgctttttctggtgtcctgaacctggaagttgtgctttttaagtcttatgatgtaatcagcgcgatttcacttcctgaatttcgatgaattc

SEQ ID NO: 13439 - DNA, 522 bp, Homo sapiens
ggactcaagatgactttctaaggtgatttggggatgcagtgtatgcatttttttactctttttgaaaaaaatcttttcttcgcctttggagtgtaacatttggatagttttattcagcccataataggaccaaagggaaggggataaaaaaaaattctttaaagtacctcagataaaaaggttttgtgaagaaaaggactcaaaatcctaggttataccaagactttatgttcattttgaattttctttattcatttttttcctctctgtgtatagaataatcaggagatattggtgggcagaactgttggttgataacaggaagcagagtatctgagaaaggccctcatcctgtttccttttggagctactgaggcctcacatgccagccattttaggatttgatgaaagctagagaagagttaaactgagccttcacttactcagcatcagtaggaagtagtgttggctacactaaaaacaccgttgtgccagtgaggatttggggggaaaatgacaagc

SEQ ID NO: 13440 - DNA, 493 bp, Homo sapiens
ggcacgaggctggccaaagccaaatctcctaagtccaccgcccaggagggaaccctgaagcctgaaggagttacggaggccaaacatccagctgcagttcgcctccaagaaggggtccatggccctagtcgagtccatgtgggctctggggaccatgactattgtgtccggagcaggacccccccaaaaaagatgcctgccctagtcattccagaggtgggctcccgatggaatgtcaagcgccatcaggacatcaccatcaaacctgtcttgtccttgggcccagctgcccctccgcccccatgcatagctgcctcccgggagccgcttgatcacaggactagcagtgagcaggcagatccctcagcaccctgccttgccccatccagcttgctgtcccctgaggcctcaccctgccggaatgacatgaacactaggactccccctgaaccctcagccaagcagcggtcaatgcgctgttaccgaaaagcct

SEQ ID NO: 13441 - DNA, 565 bp, Homo sapiens
cgcattaactttcagtttccccatgttacttttgtaacagggatttgagaccttaaactgttcatcaaagtaagccctaatagaaaggcagagcaataagagcacatgctgatgtaattctcctttgcaaggagaatttcatttagttccattgtcatatagaccagtgtcaccccttttccctgattcctactgttaacaactatttttcagtgcctttgaagatactgacccttctacctgcccagctgtttttaaacagctggagcgtgatgatggtcataaaatatataagtgttttagcatgtacagtaaaactaggttgtttagttaaacatagagttttgcctactttttcaattcgtttgactgcaggtgtggtcatttagttgcaaaccatttccatagtctgcttccactgtccagttaatctgtttttttccccttctatcatctgagcattcatctgtcatttccttcttttttatttatttatttatttatttatttatttattttggagatggagtctcactctgtcgttcaggctggagtgcagtggtgc

SEQ ID NO: 13442 - DNA, 506 bp, Homo sapiens
tacggctccgagaagacgacagaagggttacattaaacatatgatttatgaagagagtggtatagactaggagccaatatagttttaataaaaataagtcatgctaaaacaatctaatttctctttttgattctattggaggaatatgggcaagtgaatgatctagtctcagaggagcctgacaaagcctctcaaggcatctttacgttaagggtaaaatgatggctctctgaatacacagactgcatattacttttcttaatttacccccctcgtgccaggtacacagcagatgcttaaagaatgtgttggccacgcgcagtggctcacacctgtaatcccagcactttgggaggtcgaggcgggtggatcacgaggtcaggagttcaagaccaacctgaccaacatggtaaaaccccatctctactaaaaatacaaaaattagccagggggtgttggcacacgtctgtaatccccgctactcaggaggctgaggcaggagaact

SEQ ID NO: 13443 - DNA, 631 bp, Homo sapiens
tcacaggtccgtgtgccagatacgacacacacacatacacacaaagaaagacacgcacacacacacgcacacgcacacatgagcacgcacacggacgcgcgcgcgcacacacacacacacacacacacaccattaagtaaacttggttcttaggcgttaccgacagtgagggatagagagagaaatagaaagacctaagccgcaaggcaaaacccagcaagggcagcagaagagatcaaagtcctgtgcccttggctgtcagcagagtgggtgctgggaagcttctggaagcaggcacctgagtggatgccggtgcacgtgaaaagaggccttcaagcctgaagaacacgtaaggagccagaacagggtgccacagagatactacccttaaggaagacagaaaagcattcgttccggggaaggggacattatccaatcagcgaccctgtgaaactcagacatgtccgggcacggtgactcacgcctctattcccatcgctttgggaggtcgaggccggcggaccccctgacgtctggagttgcagaccagcctgaccaacatgaggaaatcccgtctcttctaaaaagacgaaactcggttgggcttgctggcgagcgcctgtaatcccag

SEQ ID NO: 13444 - DNA, 481 bp, Homo sapiens
cacgccattctcctgtctcagcctcctgagtagctgggactacaggcgcccgccaccatgcccagctaatttttttgtatttttagtagagacgggttttcaccgtgttagccaggatggtctcgatctcctgacctcgtgatctgcccgccttggcctcccaaagtgctgggattacaggcatgagccaccgcgcctggcccattttcttcctcttttgaggtaatggatttgtttggagatggcatgttagtagacgactgaatatggaaaggatatcgagttatctattttgttaattttatttttgttttttatcatctagatttttatcatggattagtctgaaatttaaagttctggccagtcggttttctttcatcttgtagtttttacagtatttccactgtgcatatgcaaaatgggtattacataactgtatcatatttggtattgataattttttttttttttgaaacgg

SEQ ID NO: 13445 - DNA, 129 bp, Homo sapiens
ggcgtttgtttctacatcacatgtttctttaatgatttctccctcccttaacttcttccccccaaaaaaattacctttgtattaagagtaacaaagccagccgggcatggtggctcacgcctgtaatcc

SEQ ID NO: 13446 - DNA, 631 bp, Homo sapiens
gaattgagaatataaaagtgggtacatgttgttccaaattagtgggaaatttatattgtaggctctaggtgcattttgctttagaatgagactcatcaataatatagaagacattccatagtataagagaacaagtactgtgacagattctcctaataacataaatttgattttttactgattttaaaattaaatacattaatatatcactaaaatagctagagatatgtaatttctaaaagtaaagcatactattattaatataaatattgaatatgtataattgttgtctggtaaaaattaaaaatacagtaataagtacataatacatataaaaataaattctatggccgggcgtggtggctcatgcctgtaatcccagcattttgggtggccaaggtgggcagatcacctgaggtcaggagtgcgagaccaacctgactaacatggtgaaaccccgtttctactaaaaatacaaaaaattagccaggcatggtggcacatgcctgtaataccatctacttgggaggctgaggtacgagaatcgcttgaacctgggaggcggaggttgcagtgagctgagatcacgccattgcactccagcttgggcaacaagagtgaaactctatct

SEQ ID NO: 13447 - DNA, 591 bp, Homo sapiens
accacagctagaccagtgggtgccacaatcactgtgtcaactatggaaagggcagctgagatcacatcaaagattccggaaagaattggcacaggatcattcgggatccatctgtcccttgcccctgttcctggctttccttacagctctcgacttcctcaaaggagtcatcaattcggggtttggcttccattcctattgaggaagctggaaagcgtttcaaaaatgctcctccgatgtgcctgtggttaagacctctgagctctgttgaaaacttttggaagctgggagcggtggctcacacgtgtaatcccagccctttgggaggctgaggcaggcaaatcacaaggtcaggtgttcgagaccagcctggccaacatggtgaaaccccgtctctcctaaaaagagaaaaaaatgagcctggcgtagtggcgggcgcctgtaatctcagctactcagcaggctgaggcaagagaacagctggaacctgggatgcggaggttgcagtgagccgagatcactccactgcactccagtctgggcaacagaatgagactccgtctgaaaaaaaaaaaaaaaaaaaaaaaaaaa

SEQ ID NO: 13448 - DNA, 648 bp, Homo sapiens
acttgacaaatgaagatagggacctctttcattataagcctattttaggctaaaatagaagggaaggggacacagtgaatccaggccttctggcatggctcctcagccctttctgagctggcctgggacagccttcctacctcactgatgccacttcctactgagcgactttcctgcctacctcactgatgccacttcctactgagcgactttcctgggctccagacccagtaagcgactttgcctgcacccaccttattttgctctactccctgtgcttttatgcctttacccatctgccctggaaagctcttctaacctttgaatgggtaaaggcataaatgtatgctggagaaatcctcagctcagggccaggcacgctggctcacgcctgtaatcccagcactttgggaggccgaggtgggtagatcacctgaggtcgggagttggagaccagcctgaccaacatggagaaacccctgtctctactaaaaatacaaaattagctgggcgtgatggcacatgcctgtaatcccacagctactcgggaggctgaggcaggagaattgcttgaacctgggaggcggaggttgcagtgagccaagattgcgcctctgcactccagcctgggcgacagagctagactct

SEQ ID NO: 13449 - DNA, 521 bp, Homo sapiens
atccttacctgtcagctctgtcttcatcttcaaaagatttagaaacaatagttactcttaagaagactatcagaatctcaccacacagggagagtgaccattctagtctaaataacaaatatttgaatggatgtggagaaatatcagtttcagaaatgaatgaaaagttcacaactctgtgttataggaagtataatgatgtctctgatctttgcaaattagaaaataaacaatattgtaggtggtccaagaaccaagatgacagttttacaatttgcaggaaacttacatatcctttagaaactctttgcaatagtccaaatagaagtacaaatacattgaaagaaatgccttggggacatatcaataacaacgtaacacagagctattctattggttatgaaggtagctatgatgcctctgctgatctctttgatgatattgctaaagaaatggacattgcaactgagattaccaaaaaatcacaggatattttgttaaaatggggaacatctttggca

SEQ ID NO: 13450 - DNA, 358 bp, Homo sapiens
aaagtgattgtatatatcactttttatcctaggtcaggataagcaagcagtacataaatttttaaaacaggtattttaggtagtgatacatgctataaaaattacatggatagagaatgaccaaagatgactagattgaatttaccacttctttgagtaggtggcagtggttcaagttggtgactgagttctaaacgatgggaaaaagacagccctgcagtggtatgtgggaagtgttctgggcagaaaacatgttctgaagctggaacaagcttggtactttaaagaaaagaggctgggcgcagtggctcacgcctgtagtcccagcactttgggaggctgaggagggcagatcatg

SEQ ID NO: 13451 - DNA, 328 bp, Homo sapiens
ggcacgaaaaaagtctcccaccttttctcctaaaacttctctcctttctctccataaaaagaaaaggaaaggaacaaaagaaaaacattcagtttttctttttctgaaaaagtaagtcctttcctgaagtcatcaaatgaaacattatctggaaattagtttctaatgttgtatatgaagaaatacttaaatataagttcctgcagtatttattagatagttgtaactgtaaactcacctccctagtagataagagtttcaggttaaatactggaacatatataggcagtcaaaaatactactttaaatgtcattcacctattttaaa

SEQ ID NO: 13452 - DNA, 300 bp, Homo sapiens
gccgccactcgtatcccccggccctgggcagccctggagctctagccggggccggagtgggagcggcggggcccttggagagacggggggcgcaacccggacgacactctgtgaccggctacggggactgcgccgtgggcgcccggtaccaggacgagctaacagctttgcttcgcctgacggtgggcaccggtgggcgagaagccggagcccgcggagaaccctcggggattgagccgtcgggtctgcaggagccaccaggtcctttcgttccggaggccgcccgggcccggatgcggg

SEQ ID NO: 13453 - DNA, 484 bp, Homo sapiens
ggcacgaggggttctttaacctgtgcttcctctgtcctacttcccatcctgcacagttcatagagtcactttctgactatcctatagacacagtaattggacctgtgtttttttctaatctttatatgacagcacatttcctaattcagggaccatcccctatcccaaattccatcctgtgagatgtgaaacctgtgagttcatgtgaatgagtgtttgaagggcttgacgccatgtagtctcttaggaaggcttcagggtgctcttatgttgatgctttgccattatcaaatggcattgattgatccgagggactcagaaagttagggtagactctataaataatttcattattcctcatcctctccgtcatcattttattggttagtcattctgccagatcactaagattcttcctctacaggccccgcaaaattccacagagccctgattctccacctgcagatggagtctccctatccca

SEQ ID NO: 13454 - DNA, 340 bp, Homo sapiens
ctaaaaagctcatctaaaagccaggctctaatgccaattcaagagcctgggactcaatgtgagctcagccagaatcttcagaatctctatggtaccccagtattcaggcctgttctagagaactcctggctctttccaaccagaattggaggtaactttaaccatgtttccttgaaagcctcctgggttatgggccgcccctttgggtcagagcagaggcctaagtggttccatcctttgccttttcagaatgcaggggcccagggccgaggtaaaagttttggtattcaatccttccatccccagatattttattcaggtgaaagattcatgaaatttt

SEQ ID NO: 13455 - DNA, 399 bp, Homo sapiens
agccttattaactatcttttcattatgagacaaaggttctgattatgcctactggttgaaattttttaatctagtcaagaaggaaaatttgatgaggaaggaaggaatggatatcttcagaagggcttcgcctaagctggaacatggatagattccattctaacataaagatctttaagttcaaatatagatgagttgactggtagatttggtggtagttgctttctcgggatataagaagcaaaatcaactgctacaagtaaagaggggatggggaaggtgttgcacatttaaagagagaaagtgtgaaaaagcctaattgtgggaatgcacaggtttcaccagatcagatgatgtctggttattctgtaaattatagttcttatcccagaaattact

SEQ ID NO: 13456 - DNA, 53 bp, Homo sapiens
gcctttgtctggaaggtgctcggtagccccgtctctcctgcctggctgaactc

SEQ ID NO: 13457 - DNA, 276 bp, Homo sapiens
taggggcgggaagcattgaagctggtttctggccctagcgctcccctgcgatgagatgtgggagccagtgtgtccctgcctgtccatcctgtgcacccccagctttccttgtcacctgaaaccacctctgagggaaggtggtggcgtctcagatgcatgggcatgtggctggtcaggtggcctccatcccagggtgccccgtctgtgtgacctccctctgggtgctgtgggcttgctccagggtgcaggtgcaaccccagcagcggtctctggggc

SEQ ID NO: 13458 - DNA, 276 bp, Homo sapiens
tggggtgccggctggtcagcaggtcacctgccaccgaggcccttcacctgcagatgggctccatcgcctgtggcctcgctggttaggctaaagggcagcccgggctcctgcgggttggagagctcatagcaggaatgtctgggcccaaccagttctcacaggctcctcaggagacagagcctggacttcgtgtcttagcctcatacttcaggattaggggggcatttgtttaagggtgtataagctctaattgtttttttttttttttggaaaggg

SEQ ID NO: 13459 - DNA, 159 bp, Homo sapiens
ctgggtgacagcgagactctatctcaaaaaaaaaacaaatttctctcctatgaaagtttctggtctttgatgctgcactttcctcttctgaaacatcaagtgcttttaaaaagggatggggctgactgcctggttctgaggcatgaacgacactggtag

SEQ ID NO: 13460 - DNA, 503 bp, Homo sapiens
agcactttgggaggctgaggcagatggatcgcctgaggttgggagttcgagaccagcctggccagcatggtgaaaccctgtctctactaaaaatacaaaaattagccaggtgtggtggcgcacacctgtagtcccagctactcgggaggctgaggcaggagaattggttgaacccaggaggcggaggttgcagtgagcagagatcgtgccactgcactccagcctgggtggacagagcaagactccgtctcaaagaaacaaacaaaaaattaaaagggatagaatataatgaaatatattttgaacttaaattatattctatatgtgtatcttcctaggcaaaagctgtaatttccagagagaccattaggaacaggtagtatctatttttctccattatttatttctagaaactcataaaatggattgtatttttctataagaacaaaatattaattaaggtatagatgactgaccaagggcttaatcaaataaaatgacta

SEQ ID NO: 13461 - DNA, 429 bp, Homo sapiens
aaataacctataaataatggcaaaaaaaaagcaaacaataggaagaggaactatataaaaggaacatttggagcatagaagagagttcatggaaatgtaaaaaatgatggtaccctgggtttgatatagtaagtaaaaaactaagggtaagagggtcatgaaagcatctagaagtaggagggaaagccagtcaaattcacaggatgaagtcaggaagataatagagcagtgcccgcaagatcctgagggaaagcaagttccaatctataagtctgtaaccctcacacctgatggccccttgaacatattcagggcttcaaaagattgatctgtcatgcaccgtctgccatgatactgtgtgaggatgtgttcttcttcttaaacattaaatcaagaaagaatcaacagtggacccagtaaatagcagat

SEQ ID NO: 13462 - DNA, 504 bp, Homo sapiens
tatagaactaaaatgtcttaaaccacgcttagtttcatatttagaacaaaaaaatccctaaaccattctgtttaactgttagaaaccattctgtaaaatgaagaaaatgggagacatggaaactgattgggggagttaagctttactctcatttttctcagccattaagaagctggaagtatgtttctttaaagaagaaaaattcacagtgtgccatcttatttctcttttctgccactttttaaaaatcttcttattcagaagttcagcaaagtaaaccaagtctggcctaatactttgatttacttgaatacctctacgtatcttaataattcctttaattttacattgtgtaaatatttatgctctggaggtgatatttcttttagtggtcaggaagtacctcttgtagtacacagacactcaagattttgttacctgagcacatactgtagggataactgggttaatgtgctttattatgctttaaagctatacctacta

SEQ ID NO: 13463 - DNA, 575 bp, Homo sapiens
ggcacgagagaaactacttctatgatttcagctggagtctgaagatacttgtttctgttcaagtcccactttaaattatgtcttaggagactgaaagtggaatcttctgagcattcctaaatatctgcttagaaatatcatgtgataaagagggaccttcttaatacactgatgttcttcactaaatggatggccacaagaaaaataaagtaaatgtcttaaataatttaaccataaattttctgtcatgtgatactggaatatgggatacttttcatgtttatatatatatatatatatgtatatatatatacatatatatatatatataaacatgaaatatatatatatggctcctttgtgccccatgtcattttcagattatggtagcatgctgatacagcaccatgaaagaactcaaggaaaatatatcaatgtaagaagttcactcttagacccagtgttctgaggtcacatgggtttggactgtctcaatcagaaagattaatgactgttatcaagaacatgaacattggcttcctccatagagaagaaatcagtatctgagttgcata

SEQ ID NO: 13464 - DNA, 410 bp, Homo sapiens
  misc_feature 254: n = A,T,C or G
atcttataactaatcttattctgtgtaactaaacaataggttaggtgtctgtcacagcatttcaactgaaataagactgaacctatcctaaacccctcacttgaaatgcccggtcttctatgtattcaaactctattcaaagtccatttcaagttctatgttttacataacaccatctttgaatttcaagaggatttatacagcatagccctacgtttggtgctatcactacttattttttttgagacagggtnctcagtctgtcacttcaggctggagtgcagtggtgccaccttggctcactacaacctctgcttcccaggttcgagcaattctcccacctcagcctcccaagtagctgggattacaggcatgtgacactacacccagccaacttttatatttttagt

SEQ ID NO: 13465 - DNA, 184 bp, Homo sapiens
gaggcggaggctgcagtaagctgagatcatgccattgcacaccaacctgggcaacgcagtgagactccatctcaaataaataaataaaatagcacatgtatcccacaaataattattaagtatcaatttttaaaagcagagatgtaaagataaatgattcttctaaaaaagtataataaatctt

SEQ ID NO: 13466 - DNA, 383 bp, Homo sapiens
ctggttttgaactcctgacctaaagtgatctaccaccttcagcctcccaaagtgctgggattataggtgtgagccaccacactttgccaataagatatatttcatatggcatctaaccacaaatattccgaaggtttcagaaaggaactgaaaggaagaaatgggctggataggagtataggatggggagaagatcagacaagccctaataatccattacgccattcatagtaagaaaatagcaagaaaggccgggtgtggtggctcatgcccgtaatcccagcactttgagaggctgaggcaggcagatcacttgaggtcaggagttcaagatcagcctggccaacatggtggaatcccgtctctactaaaaatacaaaaat

SEQ ID NO: 13467 - DNA, 568 bp, Homo sapiens
gaatctcgtggtgcgccgttttttaagcccgtcggaaaagcgcagtattcgggtgggagtgacccgattttccaggtgccgtccatcacccctttttttgactcggaaagggaactccctgaccccttatgcttcccaagtgaggcaatgcctcgccctgcttcgtctcgcgcacggtgcgcgctcccactgacctgcgcccactgtctggcactccctagtgagatgaacccggtacctcagatggaaatgcagaaatcactgtcttctgcgtcgctcacgctgggagctgtataccggagctgttcctattcggccatcttggctcccaagatataaggtatttaattcgactttttttggtagcaaaacgtgaaaaatctgaaattatatcaatgggggactggttaaacacattatgataaacccatatgataaaataacatgtagctcttaaaaggaatacgtataatctctgtagattgatctgaaggaatgtcaataatatattaagagagaaagagcaagttacagaaaaatgtttaatattattccattttaataaaca

SEQ ID NO: 13468 - DNA, 374 bp, Homo sapiens
tatagtgttgaggggcagatggggtatggatagatgttgagaatggcgtgaaggagtccttatgggactctagttcccctgctccctccaagaccactcagacccttggataagtcaccaatagctagaaataacacgagtttacttgaaatgtgtcttccagaggcagagcatgattaattgtcaagattttcctgttcttggcttagactgagttagcaaagaccctgtggatgtagaaatcacattgaaaaaccttcctaaaagtatgccctctttataagaacggcacgatggactctgaggactcaggggaacgggtgcgaggtgggtgagggaaaagagactacgcactgggtacagcatacatgctc

SEQ ID NO: 13469 - DNA, 447 bp, Homo sapiens
  misc_feature 224: n = A,T,C or G
gcgatttctacctgcgctactacgtagggcacaagggcaagtttgggcacgagtttctggagttcgaatttcggccggacggaaagcttagatatgccaacaacagcaattacaaaaatgatgtgatgatcagaaaagaggcttatgtgcacaagagtgtaatggaagaactgaagagaattattgatgacagtgaaattacaaaagaagatgatgctttgtgngcctccctgatagggttggccgacaggagcttgaaattgtaattggagatgagcacatatcttttaccacatcaaaaataggttctcttattgatgtaaatcagtcaaaggatcctgaaggccttcgagtattttactatttggtacaagacttgaaatgtttagttttcagtcttattggattacacttcaagattaaaccaatttaaattgtatgttttca

SEQ ID NO: 13470 - DNA, 406 bp, Homo sapiens
  misc_feature 117: n = A,T,C or G
aattcggcacgagaggcagtgactgccttcggctttttttctgctgactaagatctcctatagagagctacaacaatgcccaaaagaaaggctgcaggtcaaggtgatatgaggcangagccaaagagaagatctgccaggttgtctgctatgcttgtgccagttacaccagaagtgaagcctaaaagaacatcaagttcaaggaaaatgaagacaaaaagtgatatgatggaagaaaacatagatacaagtgcccaagcagttgctgaaaccaagcaagaagcagttgttgaagaagactacaatgaaaatgctaaaaatggagaagccaaaattacagaggcaccagcttctgaaaaagaaattgtggaagtaaaagaagaaaatattgaagatgccacagaaa

SEQ ID NO: 13471 - DNA, 227 bp, Homo sapiens
ggcacgaccaaagctgttttataaattagggagaagagtgaggagagaggaataggatagacgaaggtagagagagggagcagtggagaagaaaacctcagagtgaggcaaaggaagaggtgtgaaggggaaaagaagtggcgatggcagggaagagcccctggccatgagagagattgtttggagtgggaaggaagggaagttatggggcagggggcacagagcag

SEQ ID NO: 13472 - DNA, 462 bp, Homo sapiens
ggcacgaggaatggagttccacctgggctgttttattaactatttgcccctccgtttcttcatctgtaaaacagaaatgataaccttactattaattgtgtgaccttggacaagttacaacatctccctgggcgcgattgtcccatctgaaggtcataatagcacctgccacagaggatggtagtaaggattaaattagttaatccatgtaaattacctaggtaagtgcctgccatatagcaagtgcttggtacttttttttaaaaatcactggtatgactattgcagacacctttgccatgattggaatagctggaatccaaactcaagccttccatttccagggttctggctggtgtggggctgacagacctggatggggattcccagctctgcctctcttcagctgagcaagtcactggaacctctctgagctgcattctgttcagctgtaaaataata

SEQ ID NO: 13473 - DNA, 391 bp, Homo sapiens
caacaattcctgccaacacaggaacccacacagtgatgtggaaaaaaacttccaaatactcagtggtagccacacttaccacatcccgatataaggtccaccatatgcacacacaattgcagaaatctgtcctcgtttctgcactataaataaaaatcctgaaggaaatccagcccacccagacattagatgggaatcacaacaaccaaagcccctggtaaaaagtcacttcaaagttgaatccactgcatacgcagcagccttgtgacacagttataaactcttccctactacaagctcatagggcgtcccattaccctgtggacccattaccctggggacccaacaaaaggagatctgtacctcctgaaaccagtttataaaaaattaa

SEQ ID NO: 13474 - DNA, 378 bp, Homo sapiens
tgaaattgaaggttgaatatccaacatcccccacactgccccagtgtctctgctcccttactgagccttactattattcttcatagccctatcactacctagtctagtattcactgaactgtgtcatccactagaatatgagcataatgagagcagagactacacctgtcggttcagtattctatcctcagcacatagaatggtacctggcacatagcagatgctaaaataaaatttaaatgaataaattaattcaatcaacaccttcaaggtgttattattacctacaactattgtttacaagaggtatgcaccgtggaagatcctggagacacaacaatgaataaagccaagccagttcctgcccccgtggagctt

SEQ ID NO: 13475 - DNA, 389 bp, Homo sapiens
ccacattaaaaagaaaacaaaacaaaccctaactaacttccaaatgggtctcctggtgcgggggcgtgagtggccgagccctgtgtgtgctgcctgtctgagcaagcttccctagctgtggaaccccgggccccctgctgcgggctctgccttggtgtcatgcctgctgcacccccgtttccactgacgtgccgtctgtggctatggggtggtcactggaatgacggtcactccagacgtcagccggcagggatgcagcaggctggccgcgcaccggggctcgggcaccctctggccccacactggcaatgatgccacaccttgccatgtccacgctgttggtcaaacccctctgtcatgcctctttaaagagaaaagaagagaaagat

SEQ ID NO: 13476 - DNA, 135 bp, Homo sapiens
gccgtacgggagcagtcactctccgcgacacggcggcagcttcccggggggccggttcgggtctccgtcccctggcggctaccctggctcctactccaggtcccccgcggggtcccagcagcaattcggctactc

SEQ ID NO: 13477 - DNA, 428 bp, Homo sapiens
tgagtcatcgtaagccaaacattaaaattctataacttaaattgaactgtcatatagtttttgccatttgaggcttcaagagtcaaattaagcctgctttaaacactttgaaagacagtgctctggggaagaaaatgctagctaaatctgagcatctcacgttatgcagaaattattgcccttatcttcattcataatgaaagtgttggtgaaagaaggaatgaagcagaaaaatgatcactggattggaaacaaaactcctctgttttagcccttactctgcttctaactggacaggtgaccttgggagaaaaaatttaacttccatgggtcttatttttctcattgaaaaaacccagagcttaatacagtcgattctcattatttgcagtagtaatgttttataaagttgctggaaacaccaaatt

SEQ ID NO: 13478 - DNA, 583 bp, Homo sapiens
gggattacaggtgtgagccaccgagtctggccctgtgatccatcttgaagtaatgtttgtatattgactctatttttgtttgcttttactttaccctcacctgactgataaagttgagagatcctcattattttcttcttgtggggtaatggcagaagactgctctgtaacttttaccaaacaccttaccgagttgctgcagccaattcgtttatatgtcactgaaaactcagacaaatcgagtcatttctctgctttttaaaataattactcctcatcacactttcagggcctccaggggcctggtttgaaagcagaacattcaggaaagccataggaaaacagcatcctggcttaacagctcattgagaacgggccaggatgacaatggcggctttgtggaatagaaaggcgggaaaggtggggaaaagattgagaaatcggatggttgccgtgtctgtgtagaaagaagtagacatgagagactcttcattttgttctgcactaagaaaaattcccctgccttgggatcctgttgatctgtgaccttacccccaaccctgtgctccctgaaacatgtgct

SEQ ID NO: 13479 - DNA, 545 bp, Homo sapiens
aaggaaaaccagcaaataacaagaaaaccatttaatgtaaagatttgtaaataatcacttcaaaagaagtgccttgttgctgtcacatttagtccatcttcatataattcttatctgggccagtttcttgggcatgggacatgtgcagttacacaagcctgtgctcttaagagggtcttacccatagtttaatgttctgctgttgtagtcttgaaattcttaatgatttaacaaggggtcctccattttcattttgcactgggccctgcaaattacatagcccatcctgatttctacaactatagaatagcacaatgggaattccatatggattaataatatgtgacacttacggctttttctatacgcttccaagtacttcatataaattacttcatttcattcaatggtagaattggtagatgcttaacttttaatgaaagacaaagtcagattcactctaaggattaaaaaatatatgtaacattacattttaaagattttcaaaaacaatttgttgtggaaatgaattattgtcatgagat

SEQ ID NO: 13480 - DNA, 580 bp, Homo sapiens
aatcatgtgtgcaaaacatgggggaaaacatactttaaactaaaatatagttttaagagacaaatgtatatgatagtttcaagactggcaactagtgctgataatttatttttttgctaaactaattatgcctatttttactactgtcattctggctatcagatatctttctgttagatatcaaattcccagagagccatgttctacccagaggtgtttctttgctctgtttctgaatcggaaaggaaaacaaagagcagtaaaattattttcaagagattaatcataatgtcaagaacaaagctgagatttgattattgacttagaattctgtccactagattatacccttactaattatctatttttcttcactgtgaatctgtcaggctgaggtcacacagtaactgggaaacttgctactccctgctatcttttagccttgaattaggcctgtccaacccttgggactttcataagggaaataaatattttgtgagggcaagaagggcagcttttagaaataaattctattcttttccttattatttatagctctgaatgatatttaatttaaagc

SEQ ID NO: 13481 - DNA, 407 bp, Homo sapiens
ccaaaccacgaagttgttaaatgtacactaaaagggggtgtaacggaattattttcattctgtgtttgaaaatgacattgtatcttgagagtgaccatacaaactctttgctaaatttcattaattgaaactcatgtatgttcagacaatttttattttcataaaagagcatgccaggctgggcgcggtggctcacgtctgtaatcccagcactttgggaggccgaggcgggcggatcacgaggtcaggagatcgagaccatcctggctaacacagtgaaaccccgtctctattaaaaatacaaaaaattagctgggcgtggtggcgggcgcctgtggtcccagctactcgggaggctgaggcaggagaatggcgtgaacccgggaggtggagtttgcagtgagccg

SEQ ID NO: 13482 - DNA, 349 bp, Homo sapiens
aggacaataaatgaaaactaggactctcccaggctaactaaaacataacagttagtttacagatagctacataggaattccaagaaaaactcagtttgggttgtcagagaatggtttggaggaaatcaaagggctacaatttataaatgggaaagttacaagtaaatgtagaggcaagaatcctgaaatgaacatgtgaaaatacacctagaaggaatatgttagaatgggaataaatgtggctaacatctaaaactgggctttagaactaaaggagttaagacatttttatagaattcagtcttttggtctccataaaaaatgaggccggccgggtacagtggctcac

SEQ ID NO: 13483 - DNA, 341 bp, Homo sapiens
ctgctgcaagaagacaacagaaggctactgctgcaagaagacaacagaaggctgctgctgcaagacgacaacagaaggctactgctgcaagaagaccacagaaggctacggctgcaagaagacaacagaagggtactgctgcgaagaccacagaagggtactcctgccagaagacgacagaagggggagcgccgctcctgctgcaccgtgcttgctacgagtttcatgctcgtgctaaactagcgccgtcgtcttctttcttcagtcgtcatgatgattatctaccgccacctcatcacccacgatgagatgttctacgacatctacaagatgcaggagat

SEQ ID NO: 13484 - DNA, 283 bp, Homo sapiens
agatgatgtttcctccgccaggacaatcatatcctgattcagcccttcctccacaaaggcaagacagattttgttctaattctggtagactgtctggaccagcagaactcagaagttttaatatgccttctttggataaaatggatgggtcaatgccttcagaaatggaatccagtagaaatgataccaaagatgatcttggtaatttaaatgtgcctgattcatctctccctgctgaaaatgaagccactggccctggctttgttcctccacctcttgctcc

SEQ ID NO: 13485 - DNA, 431 bp, Homo sapiens
aaattagataataaagtgcttttagtaacatgcctggcacagttcattgattcaaacatgtgaaaaaaaatttttttaattatcatagtagtgtgtacctttggaaaaattagaacttaacagataaggctaagtttgagccttccagtcctttccttctctgcatactcttcaggggtaactgggatcatgttctgggagcatgtcattccaagtctgtttctttgcttttataaacacatctgtttccatagaaatgctgtagtgtttgcagagggggcggggcgtggtatcatcctggatttgttattctgcgcttttttgcttgacctaccttggatggctctctagtcgttacagcttttaccttttaactattactcagtattcttactaaggtaagactatgctgatgatgtttatatttctct

SEQ ID NO: 13486 - DNA, 642 bp, Homo sapiens
gacaggagtgaaaccctgtctcaaaaattaaaaatcaatagataaattcacctagaactaagcatttttagcgtttagtatgtggagtttcagtatttgtagtatgtggtgtttgtcatttatagtaacacacatgagaactacgagatgagacagtaaagggagctatgttgtggtaaaatttctacatttaacttgaagtggtagaaaaaaactctgattgtgaaaagtatgtattttgtaatccccatagtaagggttagtaaaccatattccacaggccaaatccagcccactgcctgtttttgtaaatacaattttgttggactgtagttacacctcattcattgcatatcatgtatggttgcttttgcactacagcatcagatttgggtgttgcaacacacattgtatggctgacaaagctcatcatatttattgtatctggccctttacagaaaaagtttgccggcccagtgtagtgactcttgcctataatcccagcactttgggaggccgaggcgggtggatcacgaggtcaggagttcaagaacagattggccaaaatggtgaaagtccacctccaccaaaactacaaaaattagccaggcgaggtggcaggcgcctgtaatcccagctttt

SEQ ID NO: 13487 - DNA, 429 bp, Homo sapiens
gacactgcactccagcctggctgatagagcgagactccatctataaaaagtaaaaaagaaagtcttcagtgagaggagattcgccctatcagctatgaaagcacagaggggaggaacatggagtaggggctgcctgcagtcagatcctgccctcacaaccttgccagggaaacaggctcgtgggtacaaaggttgtgtgcctcaacttcctcatggaagcacgtgagattattttataaccatagagtggagacagtcagtatgaccaccaaacccaggagccatatattaaaatactgataaatttaactatataaaaaaatttttacaggtgtgcaccactatgcccggctaatttttgtatttttggaagaaacgtggttttactatattggccaggctggtctcgaactcccgacctcaagtgat

SEQ ID NO: 13488 - DNA, 581 bp, Homo sapiens
  misc_feature 465: n = A,T,C or G
ggcacgaggaaaagaaaaaaaaagaatttaaaattctgttttagtggagtcatttgaacttaagtctaagtttataacaacactggcttccacagcacaggaggtgagcatgtgttaatatttaagattggcataactccctttaggtgcaagtgttcaggccaaaatgttcctgaggcattttgattcctcctcctgctgcccatctataccaagcccagaaactgtctggaatatattttagtttcctgaatgacaccaagaagtagaacagtcttttcaaaaatgtattttaaaaataagctgaatctcaagaatctgatctatagtataatgaaaactgaaaagtgaagtagtcattgggatactctactgtctcacttaattctcacggcttccctgcaaggtgggtaaaattgttcctacagatagtcaaattgagttttacagttagaaaatgattgngctaggatttgagccaatgtctgtcagattcctgagtttctgctacttctactaaaatatgctgcttcttgtgtgtccggtcttctgtttgggacaagcagatgatatccctaaca

SEQ ID NO: 13489 - DNA, 316 bp, Homo sapiens
cagagtacgaggctgagaggatgcaggtgtcctcctaggaggtttgagtcagaaggcacgaggcagaagcagtgggggaggactccctcagtagagcgaggaggaggcccctcatccaagaggaggttggagcacaggggggtctaggtttgcagtttcgggaccggtagctgaggggtcccagggcctttcttctgtgaaggagaatgtgtccaccgtggggagggggtcgggagagagagatacttcagagtggacagggctgagaaagctttatgggccgcgaaaggcagagtagttgttggtggatgagggt

SEQ ID NO: 13490 - DNA, 360 bp, Homo sapiens
aactggccaaccagtatgagaaattccacagtccatgggaaagagaagagtatagtgactgaggtgggtctctctgtccaacatgcaggcagcactccctcatcctgctcagtgagagaattcagggggaatagaaaagctgctgagagttggtaaagaggatggtcgagtgagatggtgttgacctccctggatcttatgtcactacatcctggacctcaagagggtcatccaagctttttgaaagctgaactccttgactggagaaacctagacaagaggcggggccaggtgcttgatatctaggaggcattcttcctcttcccttgccaccatggagctgggcacagtaagccatat

SEQ ID NO: 13491 - DNA, 473 bp, Homo sapiens
aaggtgacccataagtcctacaaggtgtctacctctggcccctgggccttcagcagccactcctacacaagctggcctggtgccagcatcagctccttgagcttctctcgagtgggcagctgctgtagcttccaaggtggcctgggcaccagtatgggtctgggtggaggctatggcgggaccagtggtatggagggcatcacagccatcacagtcaactagagcctgctgagcccccttaagctggaggtggaccccaacatccaggccatgtgcacccaggagaaggagcagatcaagaccatcaacaacaagtttacctcctttatcaacaaggtatggttcctggagcagcagaacaaggtgctggagaccaactggagcctcctgcagcagcagaagacagtttggatgaatgtggactgcatgttcaagagctacatcaacctatggcagcagctggacatgctggg

SEQ ID NO: 13492 - DNA, 112 bp, Homo sapiens
gagagcaagtggtctggaggaatattacagtatgttgccatatgaagagaatgctattgtctgaatgcttgtgttcccccaaaattctatgtagaaatcctaactcccatga

SEQ ID NO: 13493 - DNA, 377 bp, Homo sapiens
gatggcagtgcgtacattctggacttccagtatccgttctcagccgtgcaggcctttgcagatgccctggccaacgtgactcagcgcctcaaatgaagagactggtgtggggaggagagagatgcagagagcctttggaagaggtcttcggagatgccagaggagccctctaggggtccgatgcctgggaggaccagaagccaacagcaaaactggaaaagcccggcaggcccaggagagggcgctgacctgtggtcgtcatttatttggttgggttttattaccttttattgtctgttcttcttttcttctttcatttcagggggatttggaagcaaagagtgctaggcacctgctgttctttcaggaaacagctt

SEQ ID NO: 13494 - DNA, 559 bp, Homo sapiens
cctccagaacatccgggtcactcctaagaatccaggatccagacccagtacacacatatcaggagctcagatttcccacatcaggaagggaaataaagactactttcttaggccgggcgcagcatctcacacctgtaatcccagcactttgggaggccgaggtgagtggatcatgaggtcaggggttcaaaactagcctggccaggatggtgaaatccagtctctactaaaaacacaaaaattagctgggcatagtggcgggcacctgcaatcccagctactcgggaggctgaggcagagaattgcttgaacccaggaggtagaggttgcagcaagtctccatcgtaaataaataaagtctatattctttgagggcccaaacaagatgctttcaaaggcccaatcttccctcccttttaaaaagtgtgctctcgccaggcgcagtggctcacgcctgtaatcccagcactttgggaggctgaggtgggcggatcacctgaggtcgggagttcaagaccagcctgactaacatggagaaatctcatctctactaaaaata

SEQ ID NO: 13495 - DNA, 402 bp, Homo sapiens
atataagcagtactctttctcagtttctcttgaacattcaactcattagtgagtggttttccccagtcatttccatttttctttatttggctctgatagttttctgtttttgtttttcagagataatcctttactatactaaattctacgtgattatattttccacctctatttgcctatatttatctgctgtcttttccttttccatatatgggcttattttttttttccctcttcttccttttctacctttggtatttaaaaagttacttaggactgagtgcactggcttacgtgtgtaatcccaccactttggcaggctgaggcggaaggattgcttgacccccggtgttcaaggctgcagtgagctacaatggtgcccctgccactccagcctgggca

SEQ ID NO: 13496 - DNA, 572 bp, Homo sapiens
tacaacccagttagggcagaatggaggcaaatgaataatattcccttggtctcagagaccaacatctacagaattatcaagcatggccaaaaattgttgctcatcacctctcgcaccccacagtggaaaaagaaccgggtgactgtgtatgaatatgatattaggggagaccaatggattaatataggtaccacattaggcctcttgcagtttgattctaactttttttgcctctctgctcgtgtttatccttcctgccttgaacctggtcagagtttcctcactgaagaagaagaaataccaagtgagtctagcactgaatgggacttaggtggattcagtgagccagactctgagtcaggaagttcaagttctctttctgatgatgatttttgggtgcgtgtagcgcctcagtgaaatgcacaggatcaacagggtttgttgtaactagattgaaacactaagttgtttttactgttttggaaaatatcttaaatatcctttttgttcctaaaggagaggaaaagttgattaacttctggtttggtttagaaaaagtaatgtttgaaata

SEQ ID NO: 13497 - DNA, 521 bp, Homo sapiens
ctccgacgaccaggagccctaccctgtgactgatatttcggacctgatccgggattcctatgagaaatttggagaccagtctgtggagcagatcgagcacctacgttacaagcacaggatcagggtcctccaaggccacgaggacaccacaaagcagaacgtgcttcgagtcgttatcccggaagtctcaattcttcctgaagacctagaggagctctacgacttattcaagagagaacatatgatgagctgttactgggagcagcccaggcccatggcctcacgccacgaccccagccggccctatgctgagcagtaccgcatagacgcccggcagtttgcacacctgtttcagctagtctcgccctggacctgcggggcccacacggagatcctcgccgaaaggacgttcaggctcttggatgacaacatggaccagctcatcgagttcaaagcgtttgtgagctgcctcgatattatgtataatggagaaatgaatgagaagattaaactattataca

SEQ ID NO: 13498 - DNA, 95 bp, Homo sapiens
tccgagtctcagcacctagactaattaggatgacctcagagatgctgaagagtacctttggtcagcctcagactttttgtttttggttttttttg

SEQ ID NO: 13499 - DNA, 526 bp, Homo sapiens
ggcacgagagtttaaaaatacttctttgtaaaagttattgcacaaagaaaagacatgaatgtgtccctgttatgtactcacaaggataatgatggggttgttgctcattaatactgtttcttgtgcaataacttttacaaagaagtatttttaaactgatcattaattttatgaccacagaaatgagatgcaaaatttatgctattgtcagtggcacaggctcacagcaccactgacattttgtgtgattgtaatagaatggctgccaactaatgattctgtagacatttcatttgagtgtgcttttctttagatgtgtgattagctgtaatgctttcacttatgtctgtaaattatattggatatgtttacctgatgcctattgttgatttggagttcagttttgtattacataaatgcaagttgaactttttttttttaatttatagaagtctttgcaggtataactacaaatactcagcccctggggaggaaaaatgctttgcactactcaacagtaacccct

SEQ ID NO: 13500 - DNA, 162 bp, Homo sapiens
cccaaagtgctgggattacaggcgtgagccactgtgacgggccttacatgcaatttttatttatagccagtattagagaattactaggaaatttcatttttatatttagtgggagaaagccatctacagcatgtcttcaagcatggactatctgtaacatac

SEQ ID NO: 13501 - DNA, 485 bp, Homo sapiens
gaattcggcacgagggcccagtcagggagttagttagtggtagactcagcaggagttggttgctattcagatgtgttggggaaagtgacaggcatagctgactcggggtcattcactaagccaggagcccaggaagacacacagatgcaagcagagatcgtgccattacactccagcctgggctacagagtgagactctgtgtcaaaaaaaaaaagaaagaaaatgggcttgtgtggtagcaggtaagaaattgaatctctgttgtacagcagctagctgtactgcatgatcacttgccattccccagctgacagtggctgtctctggaactcctaccacagtcttcaattggtaggccagccctggtgccagtgattttatctgggcatggaaaatgccacttgcttctgtggaagagacacttaaaagatctggcagtcggccgggtgcggtggctcacgcctataatcccaacactctggga

SEQ ID NO: 13502 - DNA, 409 bp, Homo sapiens
  misc_feature 353: n = A,T,C or G
ggcacgaggagtatggaccgtgtgctcccaggctcctgacatagggtcatgaattagggccgagtgggagcgcagagcccctcccagtcacccggcagcagaagcagcccggcttttggaggacattgtctcctggagcagtgtcagtcccaaaaggtaactcagccctgcttctctcggctcagggttgacagtgacctgggaatgacttctacaacgtaattacgaattcactcagttttagaatatatttagtagtctcagaatcgctaattcatacccccatgaaaagcaaatttactacctaaagtacagtacttggatacaggtctttttgtctttactcttatggnatttagtcaaaatactgttttccaaagttgcttaccccttttctttcctaccactg

SEQ ID NO: 13503 - DNA, 416 bp, Homo sapiens
ggcacgagggaacacgttcaggggattgtgaggtcttgcacaagccacgtggggcaccttggcttcccggcaggaggtggacacccagccagaggcctggctcaaggtgacctcaccttcaccatgggcttcctgggtgcgcgggcctgagcgcaggttgttttgtacatattggaatatgtgttaacttatgccccgcatcccaactcacacggaagcacgggtcttgtctcagtctcttcgctgcatttggaaagcagtctcctctcgggccagcgccgggctgaggtgtccagaggcggcggcagctggcagtgccctcagcccccaagtgtccagcctggcacttcccattcaggccacctgctttgggtcaacagttcctttgccagcagcatctcctaaattgaaggact

SEQ ID NO: 13504 - DNA, 685 bp, Homo sapiens
  misc_feature 456, 462, 503, 515, 534, 545, 546, 685: n = A,T,C or G
tccagggtggaatccaagtcaaaaatgaaaaaaacagaccatctctgaaatctctgaaaactgataacaggccagaaaaatccaaatgtaagccactttggggaaaagtattttaccttgacttaccttctgtcaccatatctgaaaaacttcaaaaggacattaaggatctgggagggcgagttgaagaatttctcagcaaagatatcagttatcttatttcaaataagaaggaagctaaatttgcacaaaccttgggtcgaatttctcctgtaccaagtccagaatctgcatatactgcagaaaccacttcacctcatcccagccatgatggaagttcatttaagtcaccagacacagtgtgtttaagcagaggaaaattattagttgaaaaagctatcaaggaccatgattttattccttcaaatagtatattatcaaatgccttgtcatggngagtanaaattcttcatattgatgacattagatactacattgaacanaagaaaaagagntgatttactcacgaatcangacttcattannagatggggcaaaaaagttgtagtggtgcccataaaccagacaggagattccaaagctttttgtaggtggagattggaccaacttataggcactttatctcgctgacaaatgcctttatattattcattcaggcctgctn

SEQ ID NO: 13505 - DNA, 365 bp, Homo sapiens
aggatgtagaccagtgctgtcaagctctctctcaaagactgggaacacaaccgtatttcttcaataagcagcctactgaacttgacgcactggtatttggccatctatacaccattcttaccacacaattgacaaatgatgaactttctgagaaggtgaaaaactatagcaacctccttgctttctgtaggagaattgaacagcactattttgaagatcgtggtaaaggcaggctgtcatagagttatgtgttagtctcaggagtcttaacttttgaaatatgttttacttgaatgttacattagatattggtgtcagaattttaaaaccaaattactgctttttgaaacctcaaattatataat

SEQ ID NO: 13506 - DNA, 353 bp, Homo sapiens
  misc_feature 125, 145: n = A,T,C or G
agtccagcctgggcaaaatagcgagagaccctgaatctgaaagtaatgataaaataaaaagaatataaatgaagtctcgttgatgctggacaattcaagaattcagacttgaaccttaaacctangaaaagttactttgtatcangattctaacaattatgcttcatatttgtgaagtcctttaaaactaattttctcaagttctttctttgagacctcaatctgtcttagcattttgtaactaataactgaaattgtattcaaaggaattgtaaaccttaaaccaccaatttatttccatgtgaaaaagtgttatatatgacaagtgttttttgattgtaattgcgttaaat

SEQ ID NO: 13507 - DNA, 77 bp, Homo sapiens
ggatgtttttgcaaatcaaaagaacaatgcatgaaagggaatgacccttcctttctgtcttgagatattatcttatg

SEQ ID NO: 13508 - DNA, 546 bp, Homo sapiens
tcttaacttttctgaacctgtttcctcttttctgaaattagaataatccctccttcctagagatgttagcggaaggattcagtggtctacccttggattggaaaacattgtctttagagggtcatattgtaaatgttttctgttttgtgagtcatatagtctctgacactgcaagagcagccttagatagtatgtaaacaaattagcatggtcatatatgcccaggcagcgggtcaaatttgtcccccaggctactttgccaacgctaaatataaagctgttagcacactgcctgtatacagcaggtaattaaatgattccctaccaccaacactaccccctagttccatcgcttctggcaactgcataatcatcaagaggtagactttgggccgggtgcagtggctcacacctgtaatcccagcactttgggaggccgaggcaggtggatcacttgaagtcaggagttccagaccagcctggccaacatggtgaaactctgtctctactaaaaatacaaaaaaaaaaaaaaaaaaaaaaaatttt

SEQ ID NO: 13509 - DNA, 112 bp, Homo sapiens
aaccctgagagttcccatatgtgttctcaagagtcctcaaaataatattctccaagataattttttaaaataatagacttggctgggcacagtggctcacgcctgtaatcct

SEQ ID NO: 13510 - DNA, 504 bp, Homo sapiens
gcatggcaggcttgtcttgaggaatattatcaggcatatgtaaacagacgctggggactggcttgtgcagttgaactggccctcttgcttttctatcactgccatgaagagaagaacatccctcaagtagtagattaggctaagaagtatgagagacaaacatagaagacctggattacaacttcatcttggagttaagcccagccaaccccagctaaatcagttgagtccaagctgacccacagatgcatgaataaatttattcaattcggccgggcgcggtggctcacgcctgtaatcccagcactttgggaggccgaggtgggcagatcacgaggtcaggagatcgagaccatcctggctaacaaggtgaaatcccgtctctgctaaaaatacagaaattagccgggggtggtggcgggcgcctatagtcccagctaatcgggaggctgaggcaggagaatggcgggtgaacccaggaggcggagtttgcagggagccgag

SEQ ID NO: 13511 - DNA, 491 bp, Homo sapiens
gaggtgagcagaggctggtcgggaagtttcccggaggctcgccccgggaaccccgccccgccgccctggaagcccctgtctgctcgctggcttacccctaggacgggcagctcaccacttctcccggtcagttctgtttaagagaagctcctttctgcctgtaagcaatgaagtggaatgatcaccacaaagtggtgtaagaaaagaaaagtagacccgcagcggggtgtattcgtgctactgtttgtgtaaaacacagaaaaaagaaaggggtggtctgatgtatagtcatacacaccagtggttttggagggagtttttgtggatataccacattctctccatttatcagggattttgccctgacatccctccaccaccacgacatttggcaatctctgaagacatttttggttgtcataactggggaagtggagaggcgatactggcatctagtgagtagaggcctggaatgctgctaaacattctgc

SEQ ID NO: 13512 - DNA, 399 bp, Homo sapiens
caccatggtgcgccaggtcccgacggctccgcgccagatcccgcccactacagggagcgagtcaaggccatgttctaccacgcctacgacagctacctggagaatgcctttcccttcgatgagctgcgacctctcacctgtgacgggcacgacacctggggcagtttttctctgactctaattgatgcactggacaccttgctgattttggggaatgtctcaaaattccaaagagtggttgaagtgctccaggacagcgtggactttgatattgatgtgaacgcctctgtgtttgaaacaaacattcgagtggtaggaggactcctgtctgctcatctgctctccaagaaggctggggtggaagtagaggctggatggccctgttccgggcctctcctg

SEQ ID NO: 13513 - DNA, 414 bp, Homo sapiens
ggcacgagcctcatcagcaagccagtgagagggtgcctatccgaggatgatattccatcacctctgtcagattctgcttactagtcagtccccaggcccaggccactcgcaaggggaggacattacaggaggcgtgagtataggtggtgtgatctgtggggaccgtcgcagaggctgtccaccacaaggggttaaaacctataaaacttcgaagttggatttaataattctcaattactaggaaatagataaaaacaaattttctgtacttcacagaacactaaagtatgtattggatattgtatcccccctgaattttgctgtgtgagtgcttcccagttgaagcagtaattcaagttcattaatgtttacttcaaagccgaagtggagtcttgactcacacagttcaacgct

SEQ ID NO: 13514 - DNA, 119 bp, Homo sapiens
catttccactctttttggcctttaatcactcatgatagccctttaatgtgtcccttaaactctatgatgtttgatagtgaaacgaggtgttgaaagcatattttctggtactgctgctt

SEQ ID NO: 13515 - DNA, 501 bp, Homo sapiens
ggcacgaaaaacaattgaaattggactggaaatggagtgggcgaagtaaatacacacgttaccagagtgttgagtttgggcactcttaacagtcattattactcagtgtttattgataaatcagacaaaattgccatcttagttttgagtgtctaaattaggtgataatggttattataatttggttattttgcatgactcaagctagtaagtaaatacactctgtaatctcaaccaattttttaatttgttaaatactatcattgtcaacatcttttttcatttgcttcagacttaatgaacaagccagtgaggagattttgaaagtagaacagaaatataacaaactccgccaaccattttttcagaagaggtcagaattgatcgccaaaatcccaaatttttgggtaacaacatttgtcaaccatccacaaggtatgttttggacagggcattgttaaaggataaacagtgtttgttaaaatggaggaagcttggtga

SEQ ID NO: 13516 - DNA, 472 bp, Homo sapiens
acagtgtaccgcggggagactgcctccctgctgtgcaacatctctgtgcggggtggccccccaggactgcggctggccgccagctggtgggtggagcgaccagaggacggagagctcagctctgtccctgcccatctggtgggtggcgtaggccaggatggtgtggcagatctgggagtccggcctggaggaggccctgtcagcgtatagctggtggggccccgaagccatcggctgatactacacagcttggggcccgaggatgaaggcgtgtaccactgtgcccccagcgcctgggtgcagcatgccgactacagctggtaccaggcgggcagtgcccgctcagggcctgttacagtctacccctacatgcatgccctggacaccctatttgtgcctctgctggtgggtacaggggtggccctagtcactggtgccactgtccttggtaccatcacttgctgcttcatga

SEQ ID NO: 13517 - DNA, 594 bp, Homo sapiens
ctgctgttgttggggggtttgtggagcgctgtgggagcgtccagcctgggtgtcgttacttgcggctccgtggtgaagctactcaatacgcgccacaacgtccgactgcactcacacgacgtgcgctatgggtcaggtagtgggcagcagtcagtgacaggtgtaacctctgtggatgacagcaacagttactggaggatacgggggaagagtgccacagtgtgtgagaggggaacccccatcaagtgtggccagcccatccggctgacacatgtcaacactggccgaaacctccatagtcaccacttcacttcacctctttctggaaaccaggaagtgagtgcttttggtgaggaaggtgaaggtgattatctggatgactggacagtgctctgtaatggaccctactgggtgagagatggtgaggtgcggttcaaacactcttccactgaggtactgctgtctgtcacaggagaacaatatggtcgacctatcagtgggcaaaaagaggtgcatggcatggcccagccaagtcagaacaactactggaaagccatggaaggcatcttcatgaagcccagtgagttgttgaag

SEQ ID NO: 13518 - DNA, 322 bp, Homo sapiens
aaaactcaagaattgttattagaaaataaatctaggccacacatggtggctcacacctgtaattccagcacttcatggggctgaggtgggcggatcacaaggtcaggaatttgagaccatcatgttgatgaaaccccatctcgactaaaaacacaaaaaattagcccggcatggtggcaggcacctgtaattccagctgctcatgaggctgaggcaggagaatcacttgaacccgggaggcagaggttgcagtgagctgagaccacgccactgcactctagcctgggcaacacagcaagactccgtctcaaaataaataaat

SEQ ID NO: 13519 - DNA, 417 bp, Homo sapiens
  misc_feature 236: n = A,T,C or G
taaaagcctttgcgttcaactgtaaaaacagcaaccctcttctgggccccctctccatgacagagagctttcttctttcacttattaaactttcgctccaacctcaccctttgtgtccacacttcttaattctcttggttgtgagatgaagaactccgggtggtacttcacaatgagacactgctacattgtgatgcattggcgagactgtaacagtaagatctacattaaattanggaaattagtatgggggtctatattctgtagctttgccagtttgttcttaggattttctgttttgcctatgaattggggtgcagggagacggagttgagcaaaaaaagcaaaaagatctttccatacccgtccttccgctgagtggggcttttgtaaaagaatgagatattacaaccttat

SEQ ID NO: 13520 - DNA, 396 bp, Homo sapiens
ggcacgagcgggtcctgccggtgccacatggggtaccagggcccgctgtgcactgactgcatggacggctacttcagctcgctccggaacgagacccacagcatctgcacagcctgtgacgagtcctgcaagacgtgctcgggcctgaccaacagagactgcggcgagtgtgaagtgggctgggtgctggacgagggcgcctgtgtggatgtggacgagtgtgcggccgagccgcctccctgcagcgctgcgcagttctgtaagaacgccaacggctcctacacgtgcgaagagtgtgactccagctgtgtgggctgcacaggggaaggcccaggaaactgtaaagagtgtatctctggctacgcgagggagcacggacagtgtgcagatgtggac

SEQ ID NO: 13521 - DNA, 533 bp, Homo sapiens
ggcacgagggatgggcttgatctcctgaccttgtgatctgcccgccttggccttccaaagtgttgggattacaggcgtgagccactgcgcctggccatcaggtaacctttatggctctttcaggaaaagtgaaatcagagaggcgtaccctaaccacagctgtagtattctgctcttctttcctttttggtgagcttcatgggtggagttatcagtggtctgtactttgtggatattttgcccaccatgaagtattaaacacatcagtctagaagcattgtgaaaaggttccaaaacgggagacaaaatttaattcattcctcagttctgaaagtttgtgctttcttaccatgaatagatgaaaacttgaaaaaaatcttgacagtttactaatgtgaatcacatgtaacgtactactaattctacaatgcctttctctttagtcagcattaaaaatcttttttaaagtattggtatgaaaacaaatatttgttgccctgatcatggaattttaaaactacccacagtttaag

SEQ ID NO: 13522 - DNA, 390 bp, Homo sapiens
ggcacgagtgtctttacgtttcacaaccatggaaggactgccaacctctactcccttcacaactggctgggcatcaccactgtcttcctcttcgcctgccagaggttcctgggctttgctgtcttcctcctgccctgggcgtccatgtggctgcgcagcctcctaaaacctatccacgtcttttttggagccgccatcctctctctgtccatcgcatccgccatttcgggcattaatgagaagcttttcttcagtttgaaaaacaccaccaggccataccacagcctgcccagtgaggcggtctttgccaacagcaccgggatgctggtggcggcctttgtactgctggtgctctacatacttctggcttcatcttggaagcgcccacag

SEQ ID NO: 13523 - DNA, 399 bp, Homo sapiens
ggcacgagagaaaatcaagtttgaccagtgcagtttctaagcatgtagccagttaaggaaagaaagaaagagaaaaaaaaaaggcctggatactgcttttgctgtctctgttatgagatggaaaacttacatgtttgtgataaaaggggaccatgagaatgaattggcttggcttactttccccctgaaatcctctctcctgcagactgtcttgaaaacctggtgactggtaaataaagccctgcatggaggctgcacagcaggggcaagaggcccatcccccagcatctcactgaggacagcttcaggctgccttcctctgaacgtggtccacaccttcctctcctccacagagagggtgccgccagaatcccctgtcgctttctgtgtctgcaatgg

SEQ ID NO: 13524 - DNA, 556 bp, Homo sapiens
ggcacgagaaatgatatggaaatggaaattaaatgggttccaggtcttaaagaaagtgcagaagagatggtcaaaaacaaattggaaggaaaggataaactgaccccttgggaacaatttttagagaagaagaaagagaaaaaaagactgaaaaggaaacagaaggctcttgctgaagaggccagtgaagaggaacttccctctgatgttgatttgaatgacccatactttgctgaagaagttaaacaaataggtataaataaaaaatcggtaaaatctgcaaaagatggcacatctccagaagaagaaattgaaatagaaagacaaaaggctgaaatggctttgcttatgatggatgaggacgaggacagtaagaaacacttcaattacaacaagattgtggagcaccagaatctgagcaaaaagaagaaaaagcagctcatgaaaaagaaggaattaatagaggatgactttgaggtaaatgttaacgatgcacggtttcaggcaatgtacacttcccacttgttcaatttggacccctcagatcccaatttca

SEQ ID NO: 13525 - DNA, 496 bp, Homo sapiens
ggaatcccagtactgtgtgtgccctgttcactcctcctttgctttcccgttttcagtatgcttgaaacttttcaaaataaaaagtttgggagaggaggaatctaagtaatcctcataaaattaaataattaaatcaaaggccccatttccaactcctttttggattaaagaaaataatttataaatgaatagcttctataatatgaatccatctttataaaaagtaattcattggccgggtgtggtggctcacgcacggcctgtaatcccagcactttgggaggccaaggcaggcgaatcacgaggtcaagagatagagactatcctggccaacatggtgaaaccccgtctctactaaaaatacaaaatttagctgggcatagtggcttgcgcctgtagtcccagctacttgggaggctgaggcaggagaatcgcttgaacctgggaggcagaggttgcagtgagtcgaaatcgtgccactgcactccagcctggc

SEQ ID NO: 13526 - DNA, 606 bp, Homo sapiens
acagtcagaggtaaagaggtcactgatgatcttggtcagaggagtttcaggagcctgacagggacggaagccggcaagccccgaatcagggaaggagtgggaggtgagaacagatgatcaagggcagatgactcttgcaaggcgtggctgagaagcagagagacacagtgaggctcttgggggacaactggaaggcatggggcactttgattttaactcagggaaccctgagcttacctaagtgcagatggccagtcacagctgcaacccatagactaagaagccatgggccaggtgcagtggctcacacctgtaatcccagcactctgggaggctgaggcgggcggatcacttgaggttgggaatttgaaaccagcctgaccatcacttgaggtcgggagttcgagaccagcctgaccaacatggtgaaacccccgtctctactaaaaatacaaaattagccaggcatggtggtgcatacctgtaatcccagcgacttgggaggctgaggcagaagaatcactgaacccaggaggcggaggttgcagtgagccaagatcatacaattgcactccagcctgggcaacaagagcaaaactccgtctc

SEQ ID NO: 13527 - DNA, 614 bp, Homo sapiens
aagaaggggaaatgttgaattgtgttttccatcccaactggtatagagatttttttttcttttagttaaaagcaagtgattataggagaaataagcatgtagctcctatgactacgctgttttagagttagctggggaggaaaggctggggccaagcagttaccaagtgtacattgaattgttttaaagttgataactagatattcgaatgaatatatagggccattcaacatagtcaccattgagctatctttagagcacagggcatttaataatgggcatctccctgtggagagatctggagctcaggagcattcaggatttccatgcccctctctctctgcatcctcctgcctctaatctagctatagcaaggacactacagcagttcactctttaagagtatttctggttacccagtgaagggtgggatcaactctcccacccaaaactgggttgggtgtcaagactgattcaccacatctcaggagggtgtggaaagatgtattgctcacatgaggctttctggggagagcagggcagccatccaaacgggtctagtttttattttggttggagagtgggctggggtgaggctacttatgaatgggcag

SEQ ID NO: 13528 - DNA, 480 bp, Homo sapiens
tgctttcaataatcaagattattcatcaaatttaaaaggtaatcactgagctatctatttctcagaggaaaacatgagaaacttgaaaattaagaaagcagattgaggaaatttcacaactatgagaccattaaggaaaagaggacattacagtaatagagaatgtatggcaccttccactcacgtatcaatgcaatcagggtatatgcagcctttatcctggttcagacaatgtgatagaaaacagaaacaaataaacctaggcatagcttctgtcctcaagtaacaaactgtccagtagacagactgaaatagtaagaaaaatcttaaaactgtgaaaactaacttaatggttcaaaaataagaaataactaattaccttaaatttcagagaaagtttgaatgtatttttaacttaaaaatatgtgaataaggcttgggcgtggtggctgacacctgtaattccagacctttgggagg

SEQ ID NO: 13529 - DNA, 405 bp, Homo sapiens
accccatctctactaaaaacacataaaattagccgggcatggaggcgtgcaactgtaatcccagctactcaagaagctgaggcaggagaatcgcctgaacgcaggaggcagaagttgcatttttttaagatcacgccattgcactccagcctgggcaacagagcaagactccgtcttgaaaaaaataaaaataaaaaagatgcttgacacgtaacaggtgctcagtaaatgttggctattatttagtgacacattatttaataattgagtcagtttcctcatctgtaaaatgaaaataacattgtaatttctttgcagagtctctgagatataaagtacactgaatatcaagcatttgatctttgctatgattattcacaccgccatgatgcaactcactgtctc

SEQ ID NO: 13530 - DNA, 375 bp, Homo sapiens
ggcacgagacttgggaggctgaggcaggcaaattgcttgaacccgggaggtggaggttgcagtgagccgagatcgtaccactgcactctagcctgggcaacagagcaagactctgtctcaaaaaaaaaaaaaaaaagggttggaacaggggaacaggtggggggggggggttcacccttgtatccccacctttttggaaggccggggggggggaatcccctggggtagggatttaaaaaccacccgggccaaatgggaaaacccccgtttttattaaaaaaacaaaattttacccgggcttgggggcggggccctgtatccccactttttggggaggttggggcagaaaaattttttaaccctggaagggggggg

SEQ ID NO: 13531 - DNA, 422 bp, Homo sapiens
gaggtaatgcttcattttgcatagttgggaatcaagataatctgtttttaataatacaagaaacaaaagcataactatattatttatattacaaaagcaatctttagaaaaactaaaaggggtatataagtattgagaggagaggaaaaggaatgatatggtatcatgaggtaatttttgatcaattatagtaggaaatagacaatatctaaaatggataaagggaaaatggcaatattatctttttattttatattattttaattttttaagacaagtgctcgctctgtcgcccatgctggagtgcaggggtacaatcacagctcactggagccttgacctcctgggctcaagtgatcctcccaccacagcctcccgagtacctggtactacaggcatgccaccacacccggctaattttt

SEQ ID NO: 13532 - DNA, 416 bp, Homo sapiens
  misc_feature 416: n = A,T,C or G
ggcacgaggggagtcccaagaccctttcagggaggatctgtgaggtcaactgttggcactgtggcatgaatcaaggtggtggcagcaaacttctagtagttttgatatgtccttgatagaacaaatagcaatggttaactattaaatgttgacctagccagcgcagtggctcatgcctgtaatcccagcactttgggaggctgaggcgggcggatcacctgaggtcgggagttcgaggccagcctgaccaacatggagaaaccccgtctcttctaaaaatacaaaattagctgggcatggtggtgcatgcctgtaattccagctactcgggaggctgaggcaagagaatcgcttgaatccggtaggtggaggttgcagtgagccgagatcataccattgcactccagcccaggcan

SEQ ID NO: 13533 - DNA, 586 bp, Homo sapiens
gcaatacaaagaattcagaggaatctaaatccagttaaaataatataaactcgtatagtttcaccaaggaattatttctatgaagtcttggaaattgtccaaggtccaaactagaaagtctgagtctgaaacattactatcaaaagtgtaacattctcaactaacatgcaaataggtcatgcagagaaaatttgcctaaaatgtttgattagtgtaacctcaaaatccctaaaaaactttgttcttgggttttcttgacacaggcaaaagacattttgggggatgacaatagagttgttaagatcagattagaggggaaaaaaaggaaaaaaatagtgcttattaaaaggtcagtaatcacagtgtttattatttacatatgattttaacaattgtattaaaatcaagtatctattcaatggtgctggggaactgaattctcatatgcatatccacatggatattcagctggacactgacctcatactgtacacaaaaatggattcataatggatcatggataaaaaataagaggttaaactatatggttctttattaaaaagcataagactaaatctttatgatc

SEQ ID NO: 13534 - DNA, 566 bp, Homo sapiens
ggcacgaggagccatgcgagcagctcgttcccttggagaaagaactgtaacagaactgatattacagcaccagaaccctcagcagttgtctgccaatctatgggccgctgtcagggctcgaggatgccagtttttatggccagctatgcaagaagaggccttgaagctggtgttactggcattagaagatggttctgccctctcaaggaaagttctggtactttttgttgtgcagagactagaaccaagatttcctcatgcatcaaaaacaagtattggtcatgttgtgcaactactgtatcgagcttcttgttttaaggttaccaaaagagatgaagactcttccctaatgcagctgaaggatgaatttcggagttatgaagcattacgcagagaacatgatgcccaaattgttcatattgccatggaagcaggactccgtatttcacctgaacagtggtcctctcttttgtatggtgatttggctcataaatcacacatgcagtctatcattgataatgtttgtgaaattagagatgctgatgttctatcattgctgttacatt

SEQ ID NO: 13535 - DNA, 329 bp, Homo sapiens
tcccctagactaggactccagtgccctcctctcccaagagacaaaggccattgcattgaaggaggtgggaaatgattagattctgaacatatgtaattatttttcagtctttttcaaagatacaaatatttacatagttttaatcatgtaatatatacaatttaatgtcctagtgttttacttaatagtgtatcatgttttccctgttggtatgtagcctggataaatgctcttaattataaaaaattctgtcgaggagtgttccatagtttattgttttcctattatgagaatttaggccaagtgtggtggctcatgcctgtaatccc

SEQ ID NO: 13536 - DNA, 501 bp, Homo sapiens
cgatcttggctcactgcaacctctgcctcccaggttcaagcgattctcctgcctcaccctcctgagtagctgggattacaggcatctgccaccacacccagctaatttttgtatttttaatagagacagatttcatcatgttggccaggctggtctccaactcctgacctcaagtgatctgcccatctcagcttcccaaagttcaggaattacaagcatgagctactgcaccgggccaatcacattcattattaatcagcaagagtttatttttcatctgtggttacatggtagacacttcctaaagaaattaagatatgatgcttactataaatgttctaattatatacctggggacacaacttcactgatatgaagcaacaaataatacaagatagaatttcaattaggaggcaaaagatatgattgaggcaaccctcatttgttacagctaatgatctgggctagagaatgtgtaagagtaaagtctagaaaatgtct

SEQ ID NO: 13537 - DNA, 627 bp, Homo sapiens
gggacgccatccaggtggttcgggaggagctcaagccagatcagaaacagagagattatatccttgaaggagagccagggaaggtgtctaatcttcaatacttgcatagctacctgacttacatcaagctatcaacggcaatcaagcgtaatgagaacatggccaaaggtctgcagagggctctgctgcagcagcagccagaggatgacagcaagcgctcaccccggccccaggacctgatccgactctatgacatcatcttacagaatctggtggaattgctccagcttcctggtttagaggaagacaaagccttccagaaagagataggcctcaagactctggtgttcaaagcttacaggtgttttttcattgctcagtcctatgtgctggtgaagaagtggagcgaagcccttgtcctgtatgacagagtcctgaaatatgcaaatgaagtaaattctgatgctggcgccttcaagaacagcctaaaggacctgcctgatgtgcaagagctcatcactcaagtgcggtcagagaagtgctccctgcaggccgcagccatccttgatgcaaacgacgctcatcaaacagagacctcctcctcccaagtcaaggacaataagcctc

SEQ ID NO: 13538 - DNA, 527 bp, Homo sapiens
aggcagtcacaaaaaaactaacactgtgatttcacttatatgaggcatccaaaattcatagaatttgcaagatgaaaaaggggtggagatttattacaatgtgtgtgcaattaatttgcagacctttttaatcttgcaaaaccaaagccctgttctctttctagattgacacatttagagaaggtaagcttaggtcaggacagcacaactattggcagagaaagcccagttctcatgagcccacttctggcttgtcaatcatggcctgtccttgccctctaggaaacttggacctctcttctgggacccctcttcttgggcccctttcctttttattgttaattatgtgctttgatgcacgaagtgtcccggccccatcactctgcaaggtcactgcatctgaacagatccaggtggaaaaccttgcctgcaagtccctccttgcagctcaggcatggggctcctggtctgcgtggggccccattctctgcttctcggtgttccccagttctgggactctcatgatg

SEQ ID NO: 13539 - DNA, 395 bp, Homo sapiens; identical to SEQ ID NO: 7948

SEQ ID NO: 13540 - DNA, 406 bp, Homo sapiens
gtattgttactaaacagacaatatgtagtggaggaacactctttctcaatattagctaataaatatgtatttttaataagctgattaaggctttgttagtttctcaatgataacatcgggcccatggttctcaatcagggtatgattttgcccctcaaaggacattttgcaatatctggaggcattttcagttattataagtggggctgggtggatgctgctggcatctcatggagagagaccagagatgctgttaaacatcctataatgcacaggacaggcccccacaacacagaattatccagcctaaaatgtcactagtgctgagggtgagaaactctgacacatcgattcagtgatgttctggcaacagccaataaagtcagcaattaaaaatttgtattgt

SEQ ID NO: 13541 - DNA, 657 bp, Homo sapiens
ctctagtcctcattctactcatgcttcagtacatcagcgtcacagaccactctgccaggcaatattaggttcacgatgaaaagggagaagaagaaatgttggcagattcccgcgatactcagaaaacagtataaaaaggaccaagtggtttgaaacaggatttaagatgcaagagattacaaagaagccttccttgtagattgaatgttagcgtcaattactgatataaacatctttggggagacctcgtttgagcaaagttaatgacttctgttctggatgtgtacaatttaaagggcctataatatgttttacccatgcatcctcaacaaggatgatattgccaccaaagggggtaaaaattggttgctggggagtaaaaaaaatcttactttttatgcacaaagtatagaaaggcatatagtacataaacatttatgctactgcatatttatcaaaatttcatggagggcaattaggaaaatattgtctataacacttatgggaagcacagataatgtgaagaagtatgaagttattcaagaagtatggaatttatgtgagaatatgtgtgggagatcatatgtgtgtatgtatgcacatacacatatacatctaaaggaagtcagtgtacacacaggaattgaagccccatgc

SEQ ID NO: 13542 - DNA, 246 bp, Homo sapiens
aaccctgtctctactaaaaatacaaaaattagccgggcatggtggtgcacgcctgtagtcccagctactcaggaggctgaggcaggagaagcttgaacccaggaggcgggggttgcagtgcgccaagatcacgccactgcactccagcctgagtgacagagtgaggctccatcaaaaaaagagaaagaaagatgaactagaccagaggttggtaaactctggcccatgggtcaaatgcagcccact

SEQ ID NO: 13543 - DNA, 524 bp, Homo sapiens
cagcgttctcgggtgctacgctgctgcagctgtcgcctcttccaggcgcaccaggtaaaaaagagtgtcaagtggacatgcaaagcttgtggagagaagcagtcctttttgcggactgttcagtcagattctctgctccaagtccatagaatctcattccaagccaactggaagagctgagtctcaattataaattcctaggagaagcaacctggttggcccaggctgactcggatgcccacctctggtccagtcaactgggattgggtctcagaagagaggggctggcttaccaggtttctcaggcttatggtgaaggctctggtgctgattgtagacgccatgtccaaaagttaaatctactacagggacaagtttcagagctgccactcaggtacagttgtttgagaagagcgtggttgtcttgccctgttttcgtcttgactggataatagaagtacacagtggaaatcctgagctgggcactctgctgtggctggacctgccccaggtccctgctgtca

SEQ ID NO: 13544 - DNA, 231 bp, Homo sapiens
caaattatgctgctgtgctcatttgatgatggaatcagcatcgcatgcaggctgaacccctactacggcagaaccaagaaagccactctttcccctctcctcctaagatgccaccacagagcagggtgccagtggtgggtggggagaaagacggagacacagaaacgtctctttttcactgtgattctcctaaggaatatacagtcacccccacaggaaaagcaagagttg

SEQ ID NO: 13545 - DNA, 396 bp, Homo sapiens
attcggcacgagtggaggccccggagaccccaggagagccaccactttctcctgggttctgaacacagcccaggtgggaacaatgctgcccctcatgatgaagtggcctgtgtggcttgagcgccccatagtccccagtcagagcagagtggtgtccccagatgacttcagaccccatagctgggcaagatgcgcttgttttggactctgcgctgagcagaaccagctcccccaactcctgcagatagagaactgacttccgagagctgtaggtgaagtgaggaccaggcagcagtccagagctgtgaggccccaggcccagaggaatggaatgaagaaagacctgttccacacaaggaggggttttctagtggaagctgagcttggaagctcctg

SEQ ID NO: 13546 - DNA, 648 bp, Homo sapiens
ggcacgagatgcagtggggaatcatgacttcatagaggcatacaagtgccagaccgtgatagtccaatcattcttgcgagcattccaggcccacaaagaagaaaactgggctctgcctgtcatgtatgcagtagcgcttgaccttcgagtgtttgccaataatgcagatcaacagttggtaaagaaaggaaaaagcaaagttggggacatgttggaaaaagcagcagagttactgatgagctgtttccgggtctgtgccagcgacacccgtgctggtatagaggactctaagaagtggggcatgctgtttctggtgaaccagctgtttaaaatctacttcaagatcaacaaactccatttatgtaaacccctaattagagcaattgacagctcaaacctgaaagacgattacagcactgcacagagagtaacatacaaatactacgttggacgcaaggctatgtttgacagcgattttaagcaagctgaggagtacctgtcatttgcctttgagcattgtcaccgttctagtcagaagaacaaaaggatgattctgatctatttgcttccagtaaaaatgctattgggtcacatgcccactgtggagctcctgaaaaagtatcacctgatgcagtttgcgggagtaac

SEQ ID NO: 13547 - DNA, 650 bp, Homo sapiens
ggcacgaggttcccgcccgggactaagccggggagcgcatcccggctactgcgggtcctgggtcttcacctgcggagccttacggcagctgagcggtgggagggacctgagccgcggcgctaggatgggaaacagtgcgctccgcgctcatgtggaaacggcgcagaaaactggtgtctttcagcttaaggaccgagggctgaccgagttccccgcagacttgcagaagctgacgagcaatctcaggaccatcgacttgtccaacaacaagatcgaaagcctaccgcctttgctgataggaaagttcactctgctgaagagcctctccctgaacaacaacaaactgactgttctgcctgatgagatatgcaatctgaaaaaactagagacgctaagcctaaacaacaatcaccttagagagctgccgtctacctttgggcaactctctgccctcaagaccctgagcctctctgggaaccaactgggagcattacctccccaactttgtagcctacggcacctggatgtgatggatctctctaagaaccagattcgaagtatacctgactcagtgggagagctgcaagtcatcgaactcaacctcaaccagaatcagatatctcagatctcagtgaagatatcttgctgtc

SEQ ID NO: 13548 - DNA, 689 bp, Homo sapiens
  misc_feature 515, 575: n = A,T,C or G
ggcacgagcggagccagggactccagccccaaccccggaatctttcaccgtccacttcctgccgctcaattctgctcagactctccaccacaagagctgctacaacggccgattccagctcctctatgtggcctgtggtatggtccatcttctcatccctgagcttggggcctgtgtggcacccggagggaacttgattgtggaattagcccggtacctggtggacgtgcggcaggagcagctgcagggattcaacacccgggtcagggagctagctcaggcagctggatttgctccacagaccggggccaggccttcagagaccttcgcacgtttctgcaagtcccaggaatcagctctgggcaacactgtcccagctgtggaacccggaactccgccccttgacatcctggcccagcctcttgaagccagcaacccagcccttgagggcctgacccagcctctgcagggtgggaccccacactgtgagccctgccagctgccctctgagtctncagggtcactctcagagggtcttgctcaagctcacggggcctttgcttcggccaactggngagacaattccaaaatgggagtgggaccacccctagaccccttaaattcaacttcaaagccggtgaagaaagaacccgtgaacaatctaggccgtgctaagcctcatttatcag

SEQ ID NO: 13549 - DNA, 397 bp, Homo sapiens
ggcacgagactggatgtatagcagtttttccaagaagcttggctcagaagggtagcagacaggatgacaaatggaaagagaaatgaggtcactggaggattgttaaagagtacagcatgtttgagtgtcacttgaaaggttccagtggagaagctgaagaagtaggtaaaggtaagaataaccaagggacagaagtcctggagcagggaggagggaatgggattctttaaaacctcttcatcaagaaactaggaaaaaaaaccaaagctgtaccatctcagatttcagagaaagggaatttagaaggaagtaatataagcaaagaacaacaatattctgtgactgtttttaataataactaggaaaattcctagtgcagttaactctgaacaaaatt

SEQ ID NO: 13550 - DNA, 595 bp, Homo sapiens
ggcacgagatgcattgttggtgttttgggatgcaaggatgaattctcagaatttatctacaactaaagactcacttggtgcatattcagagacacatagtgatgatgtcactcaagtacgtttccatcccagcaatcccaacatggtagtctcaggttcatctgatggcctggtaaatgtatttgatattaatattgataatgaggaggatgcactggttacaacctgtaactcaatttcatcagtaagctgtattggttggtctgggaaaggttataaacagatttactgcatgacacatgatgaaggattttattggtgggatcttaatcatctggacactgatgaaccagttacacgtttgaacatccaggatgtcagagaagtagttaacatgaaagaagatgctttggactatttgattggtggcctatatcatgaaaagacagacacattgcatgttattggaggaacaaacaaaggaaggattcatttgatgaactgcagcatgtcaggactgacccatgtgactagccttcagggagggcatgctgctacagtccgttctttctgttggaatgtgcaagatgattct

SEQ ID NO: 13551 - DNA, 576 bp, Homo sapiens
cagagccagagctggggctcaaacgagctgtcccggggggccagaggccggacaatgccaagcccaaccgggacctgaaactgcaggctggctccgacctccggaggcgacggcgggaccttggccctcatgcagagggtcagctggccccgagggatggggtcattggccttaaccccctgcctgatgtccaggtgaacgacctccgtggcgccctggatgcccagctccgccaggctgcggggggagctctgcaggtggtccacagccggcagcttagacaggcgcctgggcctccagaggagtcctagcacctgctggccatgagggccacgccagccactgccctcctcggccagcagcaggtctgtctcagccgcatcccagccaaactctggaggtcacactcgcctctccccagggtttcatgtctgaggccctcaccaagtgtgagtgacagtataaaagattcactgtggcatcgtttccagaatgttcttgctgtcgttctgttgcagctcttagtctgaggtcctctgacctctagactctgagctcactccagcctgtgaggag

SEQ ID NO: 13552 - DNA, 581 bp, Homo sapiens
actaactttttctaagagaaattgattcctgttttgtcatctgatgcaatttgctcttataaagagacattttcataggttcagagtaactcacctccatgggctgaccaaaggcttttctaatttttgttactgatgagatgaaacctatttgtaaggagatcttccccaggagcatttctgttgccttcttgacatcaatgaaaagtagcatattctcttatgaaatagcatgagaaaacacagggcatttctaggacagtaaaacgttaaagtactggattaagaaaacaacaacaggctgggcgcagtggctcacacctgtaatcccagcactttgggaggctgaggcgggtggatcacctgaggtcaggagtttgtgaccagcctggccaacatagtgaaatcctgtttctactaaaaatacaaaaattagctggatgcgatagcacgtgcctgtagtcccagctactcgggaggctgaggctggagagttgctcaaacccgggaggcggagattgcagtgagccaagatcgcaccactgcactccagcctgggtgacagagcgaccctctgtctc

SEQ ID NO: 13553 - DNA, 532 bp, Homo sapiens
cttgtgtggtgcactgtgctcctgtctttagggacccgtgaagacaaacttcttccttcatgatagtcatttccatgcgtctgtgtccatactatctctggttaaaacaaatcccaggtacattttaaaacacggatggtggtagatcttgcatggaatggtgatctagtcacatatattttatatactctggaaatgatgcaaaaattggctacaagaaagcttatatctctccttgtaatcttctataacaattttaaactaactttttctacatacagcatgttgtttcctagatgaggcgatgaaattctttatgcagcaagagttttccagtatatttcaaaataccttattgtgaatgtttttgaaatgtgtaattactatctgattaccatatgttaaaaattttaccaaagtaatgtaaaatattggattagatagtaaaatagaataagcactccataagaaatgtttttcctaagaatggaatatgtatgggtttagaagattggatggataggccgggcgc

SEQ ID NO: 13554 - DNA, 485 bp, Homo sapiens
gtttactatttgagggaaacttgttcctgtaaattttcttaaaaatatgagtatatggcatgtgcaattttattgaaaatggaagacaattcaagttttccactatttctagctggatttcaccaccggaagctgagttaagtagagggatgataaactagctattttggtactattctgaaaatatgtgatacaaaagatataataatatggcatacacctttttaaatgttacaccaaataactttaacagtgatgcaaaaagtatgattttaaaaaattttccagctgggtatggtggctcacgcctgtaatcccagcactttgggaggccaaggagggtgcacctggaggccacttgaggccggaagtttgagaacagcctgaccaatgcagcgaaaccccatgcctactaaaaatacaaaaattagccaggcgtggtggtgcacacctgtagtcccagctacttggaaggctgaggcaca

SEQ ID NO: 13555 - DNA, 94 bp, Homo sapiens
aaaatatatatgtaataataacaataaattaaataaataaattccaattcttgcccacgcacagtgactcacacttgtaatcccaacactttgg

SEQ ID NO: 13556 - DNA, 300 bp, Homo sapiens
attcatgccagttcttccctgaatggcagaagcactgaagaagtaaagcccattgatgaaaacttggggcaaactggaaaatctgctgtttgcattcaccaagatataaatgatgatcatgttgaagatgttacaggaattcagcatttgacaagcgattcagacagtgaagtttactgtgattctatggaacaatttggacaagaagagtctttagacagctttacgtccaacaatggaccatttcagtattacttgggtggtcattccagtcaacccatggaaaattctggatttcgt

SEQ ID NO: 13557 - DNA, 395 bp, Homo sapiens
aaagaggatgtgctaagcaaacaagcattgtaaacaatatttcagaggcaaggttttggcctgctttaaaaaaataaaatgtttgcaagtacaattaaaaaccagtataagggacaggggtgggatgaaaacctgtctctaagattacgaagcctgcgttatttcccctaaatccccttcgaggaagatttgaatccctcatcaacaaattttcattgattatgtttctattatatatactgtagactctatattcacgaatgtaatcatactcattcagaaaaatataggaagagaaaatgagtatgacctgtagcctgaatttcattataaaagatttaaaaatatacattttatattaaaattgatgtaatcttttaattatgaagtctttg

SEQ ID NO: 13558 - DNA, 496 bp, Homo sapiens
cgagaactgacctaagcctcagtttttcagatctgtagtacttactttacatgattgctctttgaattgaataacataatttatgtgaaaacacttaattatgaatgctgtaaaactatcaaagccattaatatgtgttatagtagcatcatacattttgcagcataatccagagaacaaggagttgttaacaagggagaggaagataatctggttgggctagtattatactctcaggtgctactgacttcttagatgaccttcaagatgttagtacaactctctacttggagatgctattttctggggatgttaatatccactctattcacaaaattttaagaaaagtcaagtagcatggatgaaactctccaaagttctgcttaaaactaaaatatcttagttgtcactgaagccacagatattttgtgaatgcagcatgttcccaataagcagtccctcttagcctcacagtccaagctggcaacaggatcac

SEQ ID NO: 13559 - DNA, 648 bp, Homo sapiens
atcaaacaattgtagatcccttcagttcaaaacataatgtgattgtgggcagaaatggatctggaaaaagtaactttttttatgcaattcagtttgttctcagtgatgagtttagtcatcttcgtccagaacagcggttggctttattgcatgaaggtactggtcctcgtgttatttctgcttttgtggagattatttttgataattcagacaaccggttaccaatcgataaagaggaagtttcacttcgaagagttattggtgccaaaaaggatcagtatttcttagacaagaagatggtcacgaaaaatgatgtgatgaacctccttgaaagcgctggtttttctcgaagcaatccttattatattgttaaacaaggaaagatcaaccagatggcaacagcaccagattctcagagattaaagctattaagagaagtagctggtactagagtgtatgacgaacgaaaggaagaaagcatctccttaatgaaagaaacagagggcaaacgggaaaaaatcaatgagttgttaaaatacattgaagagagattacatactctagaggaagaaaaggaagaactagctcagtatcagaagtgggataaaatgagacgagccctggaatataccatttacaatcaggaac

SEQ ID NO: 13560 - DNA, 589 bp, Homo sapiens
tctatagatcaaaatgcgttaatttgaagtagtaataataatgatgcagaggatgacgaggatgatagatgattactatatgtgagacactattctaagtgttttacatttatttacttatgagaccctcactataatcctatgaggtaagcactattattatataatatggacgtacaaagagcttaaataattttcttaaggaatatagctagtaaacgtcataatcaggattgtgaatcagtctggctccagaaccagtgatcttaaccactgtgctatacagtatagggttactacttgtaagccagttttatgctagagaaaagctatctcacctctaaacgattattggttttagaaaatgtgcctctcttttaaatagtgattcagtcttatagctaatggtctattaaggttactcatatttaatgacaataaaactgcacctcacatgtatgataatgtttttgttggccgggcgtggtggctcacgcctgtaatcccagcactttgggaggccgaggtgggcggatcacgaggtcaggagatcgagaccatcctggctaacatggtgaaatcccatctc

SEQ ID NO: 13561 - DNA, 495 bp, Homo sapiens
ggcacgagcacagctgtgcagaacttaacgccacgcgctgctgttgctgctgctgctccccgggctgttgccccctacaaatacgcctccagtgtccgcagccctcatcctgccatacagcctctgcaggcaccccagcctgcggtccatgtgcaggggcaggagccactgactgcctccatgctggctgcagcacccccccaggaacagaagcagatgctgggagaacgcttgttcccactcatccaaacaatgcattcaaatctggctgggaagatcacgggaatgctgctggagatagacaactctgagctgctgcacatgttagagtcccccgagtctctccgctccaaggtggatgaagctgtagcagttctacaggctcatcatgccaagaaagaagctgcccaaaaggtgggcgctgttgctgctgctacctcttaaacaaggaaaaaccgattcaaaagccaaataaccccttatggaattcaactc

SEQ ID NO: 13562 - DNA, 403 bp, Homo sapiens
ggacggctgcatttacggggtctcccggagggccagagtcgtggcttacagaagagacgaaatgtggtctgagggacgatatgaatatgaaagaattccgagagaacgagcacctcctcgaagtcatcccagtgatgaatctggttatagatggacaagatacgatcattctgcaagcaggcaacctgaatacagggacatgagagatggctttagaagaaaaagtttctactcttcccattatgcgagagagcggtctccttataaaagggacaatacttttttcagagaatcacctgttggccgaaaggattctccacacagcagatctggttccagtgtcagtagcagaagctactctccagaaaggagcaaatcatactctttccatcagtctcaacat

SEQ ID NO: 13563 - DNA, 497 bp, Homo sapiens
ttggttcgtcacaaggcatcgcagaaggtttatgctatgaagcttcttagtaagtttgaaatgataaaaagatcagattctgcctttttttgggaagaaagagatattatggcctttgccaatagcccctgggtggttcagcttttttatgcctttcaagatgataggtatctgtacatggtaatggagtacatgcctggtggagaccttgtaaaccttatgagtaattatgatgtgcctgaaaaatgggccaaattttacactgctgaagttgttcttgctctggatgcaatacactccatgggtttaatacacagagatgtgaagcctgacaacatgctcttggataaacatggacatctaaaattagcagattttggcacgtgtatgaagatggatgaaacaggcatggtacattgtgatacagcagttggaacaccggattatatatcacctgaggttctgaaatcacaagggggtgatggtttctatgggcg

SEQ ID NO: 13564 - DNA, 137 bp, Homo sapiens
ctgtcgtatacctctttgttatgatactgataaattgtgatcttgcagtcaatcactgattttctgtggtcagaggattcattattaacctcttcatggattctatcttctgaaacccttttttctttcttttcatt

SEQ ID NO: 13565 - DNA, 353 bp, Homo sapiens
gttcaagtgattctcctgcctcatatatagctgctttattgagatgtaattcacatattatgcaattcacccattgatgtaattcacccaaatgatacaattcaatggtttttaatctatttacccagtggtacaatcattactacaatcaattctagaatgttttcatcactgcctagggatctttaaaaattccaaagcccagactatgccacaaatcaattatatcacagtctatggcggtgggacacagacatcagtagtttgcgaagctccccaggtaattccattgcacagatatgtttgggaagccatgctgcactggaatcactgtcagagtttcagggaaaata

SEQ ID NO: 13566 - DNA, 564 bp, Homo sapiens
tgaataaaatataaacatgttttattggtggtcttggttttatttatagctagactgtgaaggttccttcctttaatatctgggttactcccttcctctctagaccacttacattttttctaattagtctaagcaaagcaaacagaatgagtccaagcaccattcacttaagcaaaagaagatttaatgcttaaaaaaatcctgttataaccccaaacgttagagagtcagaggtcagcaaagaagagttctagtttgtggtgtctttggtggatcatcacagtgatgaaggcatcagtgtctgagccttcatcacactagtcttgtatgatcctcgattaactggcattcatcctcaagatgaagataattcaaaaactattgaattatacactttatttatttattttgaggtggagtctcactgtggctctgtcacctaggctggagtgcagtggtgcgatctcagctcgctgcaacctctgcctcctgggttcaagtgattcttctgcctcagcctcccaagttgctgggactacaggcatgtaccacctcacccaacta

SEQ ID NO: 13567 - DNA, 538 bp, Homo sapiens
tcccaaagtgctgggattacaagcgtgagccaccgcgcccggcctagatcgattttaaacttttaaaatcttaagtaattcctttttttgcttgatggttttcttctacctcaaagcggggactatatcttacattttcttggtattcgatacagtgcccaggatagctatggaaatacagctgatggatggatgggtgaatgagtggatgaatgaacagttggatgaaagaaagacgaatgaaaagcagatggctgggttctacaacagctgctgatttactggatgtggggacagaaggggttaaaaattaaatcaacttgagggactcttcaacttgagcagctctttactctcaaagataaaattgggataattatcttaattctggtaatcattagtgcttaaggctcaacatttttattgtgcttcaaaccacagaaaatccacagataacaactgtgattcacttgtgactttccacaggagtcaacttgtcagacatggccctatagctacttgcgtagggctggagctg

SEQ ID NO: 13568 - DNA, 55 bp, Homo sapiens
gatgacaactccctggcccattgtgagcagcagcatcagaatccaaggcatgtcc

SEQ ID NO: 13569 - DNA, 474 bp, Homo sapiens
acaaagatagtatctggaatcagtgagataaaagctaacttcttaataaatggtgctgagacaactgggtagccatttggaaaaaagggaaaattggacacatatctcacaacaaacagtaataaacaccatatggattaatagtctaaatgtaaaaaataaaatcatgcaacaacaagaaggaaacctgaatgaatcctctgtaatcttggtgtagggaaaggctttttcttaatattactcagaatccaggggcagtagaagataaactgatacattttactacagaaaaataaattttgcataaccaaaacactataaacaaagtcaaaagacaactgacaaacttggagaaaatatttgtaacatacaacaaaaggctaatatccctaatatataaagaacttttaaaccttgagtgacaaagtctgggtgtggttgttcacactggtaatcatagcattttggaaagct

SEQ ID NO: 13570 - DNA, 475 bp, Homo sapiens
  misc_feature 347: n = A,T,C or G
tacggctgcgacaagaccacagaaggggctcccccggccgggctcgcctctcccggcgcccgcctcatttgaaaacacggcctttcccacgcccttaccgccggttctgcccgcgctgcgctccgctcctcgcccctctgctcgcccttcgctttcggcgtcccacaccatctccttccctcgtcggcggcttcctcttctgctcccaccctggtctcccgcctgccttccagcaccatctctttcggatgtcattcctcgcagtgaagttctttattgaaactgccccttgctgtcagcaccccaaatctactgagggtccatcagcagtacagactggccggctntatgtgctaggtcggctcttaagaaatatactttaagcctaacggcctcaaaaaaaaattgtattatcaaacatagagtgtgaaaataacactgaaataattttaaactaaaaggctaggccgggtgc

SEQ ID NO: 13571 - DNA, 255 bp, Homo sapiens
cttgagaatggaggcaggcacctccttggaagggaataattaactttcacgttgcctaatcctgcatttctggtgttaatctagtggtaggtttatagctgaagctttctacttaagccgggtttaaaaacacgtccacaaaaggatattttcttataaaaccagagttggcccggcgcagtggctcacgcctgtaatcccagcacttgttcgagacaaacctggcgaacatggtgaaaccccgtctctactttt

SEQ ID NO: 13572 - DNA, 558 bp, Homo sapiens
ggcacgaggcagcttttagcagcctggcaagagctgtgtcaaagtgacctatccctggaccggcagcttaccggactctatgatgccttgcttggtgcttggcacacacaaatccagtgggctacacaggttttccagaagccccacgaggtggtaatggtgctgctgattcagaccctgggggccctcatgccctcgctgccctcctgcctcagcaacggcgtggagagggcagggcccgagcaggagctcaccaggctgctggagttctacgacgccaccgcccacttcgccaagggcttggagatggcactgctcccccacctacatgaacacaatctggtaaaagtcacggagctggtggatgctgtgtatgatccatacaaaccctaccagctgaagtatggcgacatggaagagagcaacctcctcatccagatgagtgctgtgcctctgcatggggaagtgattgactgtgtgcaggagctgagccactccgtgaacaagctgtttggtctggcgtctgcagccgttgacagatgcgtcagattcaccaat

SEQ ID NO: 13573 - DNA, 66 bp, Homo sapiens
taaaataatttgggaggggccgggtgttgttcggtgtgtgtgtgtgtgtgtgtgtgtgtgtgtgtg

SEQ ID NO: 13574 - DNA, 98 bp, Homo sapiens
ggcacgaggagagagagagagagagagagagagagagagagagagagagagagagagagagagagagagagagagcgagcgtgtgcgcgcgcgcgcgc

SEQ ID NO: 13575 - DNA, 523 bp, Homo sapiens
ggcacgaggccctcctgatccccagctgtcctggggccctgaccgacctggccagcagtggctccctggcccgtatcctgcagcacttccactctgagagcaaacccatctgcgccgtcggccacggtgtcgctgccctgtgctgtgccaccaacgaggacagatcctgggtgttcgacagctacagcctgacagggccctctgtgtgtgagctcgtcagggcccccggcttcgcccgcctgccgctcgtggtggaggacttcgtgaaggattcgggcgcctgcttcagtgcaagcgagcctgacgctgtccacgtcgtgctggaccgccacctggtcacaggccagaatgccagctccaccgtcccggccgtgcagaacctgctcttcctctgtggcagccggaaatgaacctgctgggtagatgcaccccctgagacagcccaggtgtctccagaggcagccccgtctcaggcttcagggaccccgcctcttccctcctgacattgagcccagcattgaag

SEQ ID NO: 13576 - DNA, 85 bp, Homo sapiens
tggtcgtggtcattgttgcttccttcttcatattgaagaacttcaaccccacagtgaactacatattgtccataagtgcttcatc

SEQ ID NO: 13577 - DNA, 114 bp, Homo sapiens
ggcacgaggaagagagaggcagtggcagagggggggcaccttttatttctatttttaaagggacaggacactaattctaccccacttcaaccttgaattcaggggggtgggggg

SEQ ID NO: 13578 - DNA, 122 bp, Homo sapiens
gggtttggtttgctttggtttatattttttcagttgtttgtttttgcttgttatattaagcagaaatccctgcatgaaaggtactatatttgctagactctagacaagatattgtacataaa

SEQ ID NO: 13579 - DNA, 409 bp, Homo sapiens
ggcacgaggccctctggggttggcctcaaactgtgatcacccacacacccactttctgttgggtggcggctctaagaggagctccactggattcctgaacaggagactcaccccctcccctggccctgggcagagggagaacctgggccctgggtcagtggccccagagcagtgtctgcctcccacaggctgccacaccctgtacctgagctcagtgagcgtggagaccctgactggagccctggccgtgcagaaagccatctccaccacctttgagagggacatcctccccacgcccaccgtggtccacttcaaagtcacagagcagggcatcactctgactgatgtccagaggaaggtgtttttccggcgccattacccactcaccaccctccgcttctgtggtatg

SEQ ID NO: 13580 - DNA, 110 bp, Homo sapiens
ggcacgagcctcaaggcagttcaagcaattctcctgcctcagcctcccgagtagctaggactacaggcgtgtgccacctctcccggctaatttttttgtatttttagtag

SEQ ID NO: 13581 - DNA, 140 bp, Homo sapiens
gttttctgcatagttcttaactaatcttgtctgcagtttggtattgataatattagcatggccacttatgctgaatacacaataagatacatttaaaaatccttaatgtactggttaggtcagtggtacaactgtttgac

SEQ ID NO: 13582 - DNA, 645 bp, Homo sapiens
cttctccgttgatgtgaataatgtggtactcattttaaatggaagagaaaaagcaaagatcttttatgccacccagtggttactttatgcacaaaatttagtgcaaattcaaaaactccagcatcttgctgttgttttgctcggaaatgaacattgtgataatgagtggataaacccattcctcaaaagaaatggaggcttcgtggagctgcttttcataatatatgacagcccctggattaatgacgtggatgtttttcagtggcctttaggagtagcaacatacaggaattttcctgtggtggaggcaagttggtcaatgctgcatgatgagaggccatatttatgtaatttcttaggaacgatttatgaaaattcatccagacaggcactaatgaacattttgaaaaaagatgggaacgataagctttgttgggtttcagcaagagaacactggcagcctcaggaaacaaatgaaagtcttaagaattaccaagatgccttgcttcagagtgatctcacattgtgcccggtcggagtaaacacagaatgctatcgaatctatgaggcttgctcctatggctccattcctgtggtggaagacgtgatgacagctggcaactgtgggaatacatctgtgcacca

SEQ ID NO: 13583 - DNA, 164 bp, Homo sapiens
cacacaggtcccggggcatcaggagaaaggctgggtcttgggaccttgtcctccccagttggcctactgttacacattaaaacgatttgcccagctcaaaaaaaaaaaaaaaaaaaaacttctgggggcctttttttcgtaaaacccaaacttaaaaaaaccct

SEQ ID NO: 13584 - DNA, 253 bp, Homo sapiens
aaatgtttctgatgtgaataaataactgaattttacgtttttctctaattttagtgaatttaaacttagttacatttggctagtacttctatcttagcctgtctcaaaaatagcactaaagatgaggaataccaaattcttctctaaaatcttccacaatttcattggctgatctccaccaaatatctcctttgtattttattttcctgtctttaaaatggtgcttacaattcatagtctctaagtaaaaaca

SEQ ID NO: 13585 - DNA, 60 bp, Homo sapiens
tagttaaatagccttcatactgtggatttttcctcctactaactaatatgtgggaaatta

SEQ ID NO: 13586 - DNA, 144 bp, Homo sapiens
tggtcttgaactcctgacctcaggtgatctgcccgcctcagcctcccacagtgctgggattacaggtatgagccaccacgcccggcccatttttttttttgacaactttttttttttaaaacagggttttgttcctttgcccaa

SEQ ID NO: 13587 - DNA, 308 bp, Homo sapiens
catttttttctatcatgttcttaattttcattccttttctatagcattctattcttgactcaagaatgtaacattttgtctgcatatattcatttttttgaagttttcttattcctgcatagtctattgcttcatgtattttttttgtttttgttttcttttggtctctgtcatgttggaaacttttctcaattgccttccttaggtaactgcataatgtgatgtggaagattcaaaagttgattgccttatctaaattcgacagtttgaaacttccctttaagctgatctgggtcagccattttggg

SEQ ID NO: 13588 - DNA, 541 bp, Homo sapiens
  misc_feature 466: n = A,T,C or G
gtcatgtctccacactcctgctagatgtactccaagagagcaaagtctctatttctaatattcctggctttgtgcttggaagctagcaaatctatgaactatgtattgaataaatcaaaaagcacaccatgattttattttgccaaccattttatgtattattagaaccaccagaaataaatgggtgggggattctagaaattactgtaataatacagtagaaaatctaacaaattttgtgacccatcagaactcaaaatggcaggtaagatttcagaactaaagttcaagcacggtaagaataagtctaaaaaggaacaatttagcatgcattgacttcctaacaccctcagattacgtgttattttggagagagaagttaacacatgttgaccacctatgaagtaccacttgttaatatacatcctatcagcgaatcctcaaaatatttccttggacaccgcanaacagatcgggagagtttaagctcttggccgaggacagagccagtaatggctctgtcattacaacatacaagggc

SEQ ID NO: 13589 - DNA, 147 bp, Homo sapiens
gaactacaccgaccatgatgtcatcaaatgggtgctctacattggccgcactggcatttatgaaactcgctgctatctgccactatgcagctatcccacctccccaaccaccctcctccacaggtccaggtgccgctccctccccca

SEQ ID NO: 13590 - DNA, 669 bp, Homo sapiens
accttaagcctattcttcctatagtccattttttatttgcacagtagacataacattaatagttctattagctttttgatggctaaatgaggtaaaagagagtgcttagaaaaatatctggcacttgataagctctcagtaagtgtttgctataattatttctttatttgagttgttatatgaggaataattaaaagattacaaaaatagcaaatgaagatgattaaagccccatttttaaaatgcagctggatatttgaaatgaacagaattatcctgcctagagtaaatcattctcttaattctctcttgacaatagtcccactgaaaatgtgcccatttactatgctttaattcaatttttttcattaattcaaacaaataaacatgtactgaacacccactaagttccagagcagatgcagtctaatgtggagatgcaaagaaaaataaggcagagtctctgtcttcaagaaattaatgatgaaaagggaaattgatattggcacagaaccaaatgaccagaaaaaatgctttagcccactccctgattcacaggcttacttaaaaaatgttagtgaacatttcatagcaactgataatgcaggtaaaactaagagcaaagaactgtagcttgcatgcatttgtatatgaagaactccttttatg

SEQ ID NO: 13591 - DNA, 118 bp, Homo sapiens
agtcagaatctgtaacaatttaaattaacaacttaaatgtcaaagaatactttctaagttgattgctctaagaaaataaccaaatgggccgggcgtggtggctcacgcctgtaaacct

SEQ ID NO: 13592 - DNA, 490 bp, Homo sapiens
catacaacagcagcatacttattaccttgaattggtgatttaatagaggcacagctggtagcacaatacatattgtttaaactatttgagcacatctggtcatatcctattaaatcatttaaatccaggtaaaattggggacctccccacgtccatgggaattatgacagaaaactttccgaacagcaaaacacatgcaaggagacacagtaatacctacagaaaaaccttactagtattcaagttaaattaggtatttgttggaccctgggataaatgtggaaattgacaaacacaattaaaagacttactttggccaggcgcggtggctcaggcctgtaatcccagcactttgggaggccgaggcgggtggatcacaaggtcaggagatcgagaccatcctggctaacacggtgaaaccccatctctactaaaaaatacaaaaaatcagccaggtgtggtggcaggcgcctgtagtcccagctactcg

SEQ ID NO: 13593 - DNA, 378 bp, Homo sapiens; identical to SEQ ID NO: 8194

SEQ ID NO: 13594 - DNA, 452 bp, Homo sapiens
agacgacagaaggggagacagagtcttgtcctgtcacccaggctggagtgcaatggcgtgatctcggctcactgcaacctccgcttcccaggttccagcgattctcctgcctcagcctcccaagtagctgggattacagaaaaatggatggacatgttttactgcctgaacgctggtgccagttaggccaacagtcatgtggcaatggctatgaattgcaagcattgctgattgttatctgctgctactgcctttgagctggagcggaacagatcaacatgggccaaacaagagcctctttggagatttctctactgcttcaagcacacagattccaagtttagaagctcaagagaaggttgaaaataaaatacatttagtttttgtcatctacctgggattacttcactattggaaaagaatatcacaagataatataaataacaaattac

SEQ ID NO: 13595 - DNA, 447 bp, Homo sapiens
agaatttatgcccttgcctgactggctgccttatccaattcagcatgctggaacttaaaaatattggccgggtgcagtggctcacgcctataatcccaacacatcgggaggctgaggcgggtggatcacttgaggccaggagttcgagaccagcctggccaaaagtggtgaaactccctctctactaaaaatacaaaaaattaccggggtgtggtggcagacgcctgtagcccccgctactcgggaggctgaggcaggagaatcgcttgaacccaggatgcagaggttgcagtgagcggagatcgcaccactgcactccagcctgggtgacagagcaagactccatctcaaaaaaagaaaaagggggggatactggatcatgagcaaatgtccactgatgctatcagcacggcgatggagactggcccatggatgggggcaagccgc

SEQ ID NO: 13596 - DNA, 644 bp, Homo sapiens; identical to SEQ ID NO: 8203
  misc_feature 406: n = A,T,C or G

SEQ ID NO: 13597 - DNA, 663 bp, Homo sapiens
ggcacgaggtctgacctcgcacagctgcccatgcaatgatgagtggatcaaacactacggcttatacaagatgctcctcacagaatgaaaaacagctgctcattttcagttagctattagccttttagccccacccttgttttctctttttttgagacggagtctcactctgttgctcaggctggagtgcagtggtggtgccatcttggctcactgcaacctccaactcctgggttcatgtgatttgcccacctcagcctcccgagcagctgggtttacaggtgctccaccacacccggctattttttttgttttgtatgtttagtagagatagggttttgccatgttggccaggctgctcttgagctcctgaactcaagtgatccacccaccttggcctcccaaagtgctgggatgacaggcgtgagccatcgcacctggccagccttacccttgtaatgaagcagtgaagtacagctggcccacatctcagccaacatcatcttctgacagaatctgcttcatacaaacgcattacacacaacaggacacaatgcacatgccttgttcataccctcagagctgcctggcaaataccatggtttggggacgaatctacactagacctgcctggctgcagtggtaacactccattgcctaact

SEQ ID NO: 13598 - DNA, 614 bp, Homo sapiens
ggcacgagtgagataggaccatgtgctttgagagtgtttagtatcttaaaactcctgtacaaatgcatagcaccaggcagacagtaggagctcagtttacagcatgaatggtgggtgctcttatactcagaattccatctgctcctcccagtgccagactccttcctcgaacccagagccttctcccatagtatctctttagcctcttgggaactctggactgctccccactgaatgtgccaacgcccccactcaccactgcctggctttcactcccagtgtcatggacttggttccaaagggctttgagaacctcacaaaaaaacccactccaaatctttgagggtctaaagggaagattctggccccttcccagagacccatctactgtagggacaggaaaagaagacctggggggtagggaggggtagatggtaaatttccttaccaagaaaaatgccagccaggtgcggtgtctcatgcctataatcctagcattggaaggccaaggtgggcggatcacctgaagtcgggagttcaagaccagcctagtgaacatagcgaaaccccatctctactaaaaaaatacaaaaattagccggtgtggtggtgga

SEQ ID NO: 13599 - DNA, 600 bp, Homo sapiens
ggcacgaggctgaacgcgcggtcaccctcggccgccgcacccagcgcacttcccggcgcgattcctggacgcacactgcaggaccaagggcacgcagaggtcggagcctgcccagaagccacacctggccagaaaaaccgaaggtgtatcaaggtgtccgagtgaagatcacagtgaaggagctgctgcagcaaagacgggcacaccaggcggcctccgggggaacccggtccggaggcagcagtgtccacctttcagacccagttgcaccatcttctgcaggactgtattttgagcctgaaccaatttcttccacgcccaattatttgcaacggggagaattttccagttgtgtttcatgtgaagaaaactcaagctgcctcgaccagatctttgattcctaccttcagacagagatgcacccggagcctttgctcaattccacacaaagtgctccacaccatttcccagacagcttccaggccacccctttctgctttaaccagagcctgatcccaggatcaccttcaaattcctccattctctctggctccttagactacagttactcgccagtgcagctgccttcatatgctccag

SEQ ID NO: 13600 - DNA, 404 bp, Homo sapiens
ggcacgaggtctgatgttggcctcaggaagggacggtactacagtgtaaatgtgcccattcaggatggcgtacaagatgaaaaatattaccagatctgtgaaagtgtactagaggaagtataccaagcctttaatcccatagcagtggtcttacagctgggagctgacacaatagctggggatcccatgtgctcctttaacatgactccagtgggaattggcaagtgtcttaagtacatccttcaatggcagttggcaacactcattttgggaggaggaggctataaccttgccaacacggctcgatgctggacatacttgaccggggtcatcctagggaaaacactatcctctgagatcccagatcatgagtttttcacagcatatggtcctgattatgtgct

SEQ ID NO: 13601 - DNA, 376 bp, Homo sapiens
ggcacgaggggctaccaatttgagaccattggtctggtagatacactttcattaatatacttactccatcactctttctatattttagaagttactagtagaaatgtatgcaggagtcactggagaccttattaaaatgcagcttctgattcagtgagctggggtggggcctgagagtctgcatttctcccaggctccctggtgctgccagtggtgctgctctgagtaacaagggggtggggaatgatatggagccgtccattattatcccatctgacaaatgagtcacagagcccttaggtaattgaggtgggatcagtctgattctgtaagctgtgttttcagccacaacatttactgcaaacttggagtaggg

SEQ ID NO: 13602 - DNA, 414 bp, Homo sapiens
tggcatagtgagggaggctgggacccaggtgctagagtgactgatggctagcaggaggttgggagatgatggtgttgagggaggagtagaacggtggttggcaaggatggcatgggcatcaaaggaatggaagttttttatggaggtgaaagagcacaggttggaaagagcaataggaatgagcttggggaacgcactctgcttcttgccctgtttacttataaagaaagtatgtgtaatcccagcactttgggaggccaagttaggcagatcacgaggtcaggagatcgaggccatcctggctaacatggtgaaaccccatctctactaaaaatacaaaaaaatttagtgaggcgtggtggtgggtgcctgtagtcccagctactcggaaggctgaggcaggagaatggcgtg

SEQ ID NO: 13603 - DNA, 659 bp, Homo sapiens
tgaaggacctgcctgcggctgctttacagtttgtttgtttttttttaaaataagtagaagatatacactaaagtaatgataaatgtatagtatagtaaatacacaaaccattaacagttgtttattttcaagtatatgtactgtacattaattgtgtgtgctgtacttttatacaactggcagcatggtaggtttgttcacaccatcttctccacaaacctgagaatcgtgttgttgcactgcaagtcattaagttaggaattgttcagcttcattataatttgtgggaacataagatgtccttaaatagcacataactgtaatgtgttttttttaacatcttggttttttcagcagctatgttagtatccagcagataactggcactctggacatttgatgggtgaaaatattcacggttcattcttttcttcgaatgagccccaataatcattgcctcctgaattcctctatcaatattttgtcctatcatttgacatttttagacatttaaaacttcttagtaagataggacattactgtaagagcatttgtctgcatatactatttcagtttttttcccctttgtctgagttaatttctctatctactgttcacagtaaagagttccataacatactaacacttgacctaaacag

SEQ ID NO: 13604 - DNA, 346 bp, Homo sapiens
aaaagcatcagcaccatgagattcacctgcctctggtcgttagagatggaatttcaacatgttgcccagactggtctggaactcctgtgctcaagtgattcgcctgcctcggcctccgaaagtgctgggattataggcatgagccaccctacccagccaaaaagtataaatactcttagacagcaaaaatgctttctcccagtcttgttcccttgttctcagttcccaccctgcctggataactactgttcttggtttcttgtgttaaagatggatcttgatagtctcgtaccagattcaaaaatcagtcaactacttcaaaaacaatgacatgctggctacttaa

SEQ ID NO: 13605 - DNA, 399 bp, Homo sapiens
ggcacgagagcagaagattctctcagtcctggtttctccctccagaagaccccccacccaaatcctctgtagctcctggtagtgccctgacccctgctgccaccgtccttcagagagcaacggaagagcttcccggagggcgaggaaaagagggaaagtagccagcaatgtcgaacgcaatgtataataagatgtggcatcagacccaagaagccctcggtgctttactcgataaagagcctcagaagatgattgaaccacaaagaaatcaggttttcatctttcaaacattagccaccttctacgtaaagtatgtgcagatctttagaaacctagagaatggctacgaccaggtcgtccacccccagaaacgaatactgatcaggaaagtcctggacg

SEQ ID NO: 13606 - DNA, 484 bp, Homo sapiens
tgcctatctcccacccctcgtttcctcacaaagcaagccatagagactagaattcctctttctcaacctaaaaaaacgtctgtaactttcccctgcctttctgtgtaagatctggccatcaagacattttttgacctaccttccctcattccaggaagggtcctgtcctgtacccgggaggaagaaatgctacacagagaagccaagatgaatctgaacagacagcctttgtcagttccacagattccataaaagttaactccagagcagagaatgatgccacagtcgggataacatccaatatttgcaatcagaagaaatatgaaagtcttgctccatcacccaggctgcagtgcagtggcacgatcttggctcactgcaagctccacctcccgggttcacgccattctcctgcctcagcctcccaagtagctgggactacaggcgcccaccaccacgcccagctaaatttttttgtattttt

SEQ ID NO: 13607 - DNA, 526 bp, Homo sapiens
taactacaagtaactgggcagggatggttagctgggaggtatggatttcatttccattactaatgcctgcaattgctgataatagacgtgccccaggaatcgctgcaagggaaatggagcaagggtctccttctgtggcccagtctggaatgttagtggtgcaatctcgactcactgcaacctccgcctcccggattcaagaaattctcctgcctcagcctcccaagtagctgggattacacgtacgcaccaccatgcccggcaaatttttgtatttttagtagagatagggtttcaacatattggccaggctggtctcaaactcgtgacctcaagtgatctgcccgcctcagcctcccaaaatgctgggattataggcgtgaaccatcacaccgggccattccaatcactcttcatttcctgcatctcaaagcaacgctgtcaaacagttggagttgattttctaggcctttctgttttccccctcctgcttgccattgcagggcctcctctggtcactcgtacc

SEQ ID NO: 13608 - DNA, 413 bp, Homo sapiens
tacaaaaacaaacaaacaaacacaaacctctcaaaatatcagatctagattttttttttctcagtacggcttacttataggtggtaatcgaagctatcagcacaaaagctgatatttccttaaaaccttgatagcttttggcaaatgaagctataagcttaaaaattcaaacccattaagaaatactttcactacatagaaattttagagaaatttttctttatcaaatgattctttgctttgcaaaatggtcaacccatatattatattatgtactttccacaaataatctgtattttttaaatcttccctaaaaagcaaatttttggtaaagaatggctgatgacaacattcatgtgtaatttctttgctgtagcattaaaaatcatttgcgaagcacaaaatacatacca

SEQ ID NO: 13609 - DNA, 565 bp, Homo sapiens
taattgttgaacatctttggaaagctataattttcacctgcttgcaacttgcataaagcaaattccatagcagagtgaagaatattaaagacctctattagagggagcctcttcagttacccaagggcacacagttcacttggatagtcagtctcctgggagtaattattttagattgtattccttattccagaagacaggtgttttcacatcacagatcttgggaaagtgtccatgacctctgtaggccttctatcctattgccctgaattagagaaaggaacgcaccaacagttctccagaatcaattctaattattaaaccctatttagaatttatgcttaattctcttatatagttattttataaatttgctcagtaaaccagtatatacagcataatccccttatttaatgtatgtcagggccaaatttaaatgaatattctcagccgggcgcggtggctcacgcctggaatcccagcactttgggaagccaaggcagacgaatcacgaggtcaggagatcgagaccatcctggctaacacagtgaaaccccgtgtctac

SEQ ID NO: 13610 - DNA, 446 bp, Homo sapiens
  misc_feature 392: n = A,T,C or G
taagcctgtctcctcatcgataaagtggatacattaatagaatcttcaacgtggggttgttgccaagataaatgagttaatatatgtaaaatgctaagaacagtaccaattacttattattataagtattattatttatgcattgatgccatgtccaagaaaggcttcttgagttcctgctttccgactgccccaggcctctgagtcaggccatgaacaggaataatgactaagaaacataaacctcatattgattatttcttttgagatagagttttgctcttattgcccaggttggagtgcagtggtgcgatctcaactcactgcaacctctgcctcccaggttgaaacgactctcctggctcagcctcccgagtagctggtactacagngtgcgtgccatcatgccctgctaatttttgtatttttagtagagatggggtttt

SEQ ID NO: 13611 - DNA, 561 bp, Homo sapiens
gggctctgaagtctttttatttcaacttcttggaatcaccaccttgttaatgaacatcaaaatcttttgtgtcatttatcagattaattactttttccataaaaagagtgagttgagaggataacaagaaactccctgtccctgcttcatcctgaaaacaggagaatcaatatcttaaccctgtttttgagagatgaatgggtaggtcaacattgcttggctatttgtccttccatttgggacagattaccactgcactttcccctcaatctctagaatcatggcttatagaaaacaattttgtactgaattactaaatgcatcaaaactttattagacttattatcaaagagcatgctcagatgtatctattataaatagtaataaaaatataaaaacctaaaaacaatattataaataacagagaaaagctatgcactgttatgaaagcctttcatatttagggatatcaggtaaggtttcccttggtggggaagatgaagagcaaaccaaaataagagtaagagctggctgggtgtggtggcttacgcctgtaatccc

SEQ ID NO: 13612 - DNA, 620 bp, Homo sapiens
aggctatgaattcaagaccatcctgagcaacaaagcaagactccatctctatttcaaataatttttaaaaggcacattctaataaattctactgccaccaaagcaaaacaaaacaaaataaaaacaataaagagaaattatctggaagctgagtatgaaatgtggtatcaggattcttcaattcattccaattttctgaaatccattagatacagtgcaaccaaactatgctcagtggccactgggacagatagaaaattctataactgatacattcggggaggagccaagatggccgaataggaacagctccggtctacagctcccagcgtgaccgacgcagaagaccggtgatttctgcatttccatctgagacctgcagctgagggtcctgtctgttagaaggaaaactaacaaacagaaaggacatccacaccaaaaacccatctgtacatcaccatcatcacagaccaaaagtagataaaaccacaaagatggggaaaaaacagaacagaaaaactggaagctccaaaaatcagagtgcctctcctcctccaaaggaacgcagctcctcaccagcaacagaacaaagctggatggagaatgactttgacgagctg

SEQ ID NO: 13613 - DNA, 658 bp, Homo sapiens
atctggacttttcagctcaatatacatgataaataggcaggctttaggcctggctatccatttttggccactttatcactggctaccagcatgtgaacaagtcttgcaggaatagcataagattatggcacacattgattttcagcttttgactgtgttttcaataatcagatataggtgaaactgtttaagtacaagatagaggcccaatttgacagactttgaaccccaaggtcattttaagagtcagggacggaatggtcatttgatagatgggataaatatatcctgggggataaaacaaagctgtctttgatcctcctctttttagtttgttcctgatactttacatggccatcttttcatatacccattgtttacagaatcagaagggtaagatgctattctgtgcagagaatgataagaactagtacctaataactgctagaaagaagggggccgggcgcagtggttcacgcctgtaatcccagcactttgggaggctgaggcaggcagctcacctgagggtgagagttcgagaccagcctgaccaacatggagaagccccgtctctactaaaaatacaaaattagccaggtgtggtggcgcatgcctgtaatcccagctactcaggaagctgaggcaggagaatcacttg

SEQ ID NO: 13614 - DNA, 638 bp, Homo sapiens
ggcacgagggttggctctttagggcttcaccccgaagctccaccttcgctcccgtctttctggaaacaccgctttgatctcggcggtgcgggacagacgctagtgtgagcccccatggcagatacgaccccgaacggcccccaggggcgggcgctgtgcaattcatgatgaccaataaactggacacggcaatgtggctttctcgcttgttcacagtttactgctctgctctgtttgttctgcctcttcttgggttgcatgaagcagcaagcttttaccaacgtgctttgctggcaaatgctcttaccagtgctctgaggctgcatcaaagattaccacacttccagttaagcagagcattcctggcccaggctttgttagaggacagctgccactacctgttgtattcactcatctttgtaaattcctatccagttacaatgagtatcttcccagtcttgttattctctttgcttcatgctgccacatatacgaaaaaggtccttgacgcaaggggctcaaatagtttacctctgctgagatctgtcttggacaaattaagtgctaatcaacaaaatattctgaaattcattgcttgcaatgaaatattcctgatgcctgcgacagtttttatgctt

SEQ ID NO: 13615 - DNA, 480 bp, Homo sapiens
ggcacgagcagactcctcaatctgagtgagagacaagtcaaaatctggtttcagaaccggcggatgaaaatgaagaaaatgaataaggagcagggcaaagagtaaagattaaagattacccccagtcctccctagctcttccccatctcactcttagttatgtgacgactgcaaagccagtgctgtctgggatgtattcaagtgaatggggaagggagtctctcttccaagtcctttatctgcacctagaacctccctcctttcctttgcccttacctgtctctctcttctctctaggtgtcaggagaaagttttgttgatttagaagatagaaatagttggttcctaagaatgtgatgggccacaaggaaagagagaccccagtcaagctcctagtatgcccctgtatttttctgggaagtcctagcccctcacttccagcttgcctgtttcttctctacacccacccaaaagtcaccc

SEQ ID NO: 13616 - DNA, 407 bp, Homo sapiens
tagcgcagccccccggagtccttgttctccttaagagggtctcgctctgcaaagcattggcgccatggcttttcctttgcatgggtgtgcacaccgagagacaggcagcttaggaaaaacaacataaggaagacttaaaaggatgcactgatttacgacgttttttgatgttagccatttttttggaaattgttttttaaagcaaaagttttttaaaaacatggtttatagtttttcacttacatatactattgtaaatacttagcagagtcttaagttactgtataaaacatttcattgtgtttgaagacatacttatgggtcttgaggtctgggtcctaatacttttaaatagtgtatttattatgtaaactgaggagtgccatttaaagtgtgaggattgcctg

SEQ ID NO: 13617 - DNA, 58 bp, Homo sapiens
aaaattctgggattacaggtgtgagccactgtgcccaacaagagtgaaacactggctc

SEQ ID NO: 13618 - DNA, 547 bp, Homo sapiens
agatttgcttagattgttgtactgctgccatttttattggtgtttgattattggaatggtgccatattgtcactccttctacttgctttaaaaagcagagttagatttttgcacattaaaaaattcagtattaattaaacattacttattctaccctcttttttggcaaggaggacaaatacgcaatgttggaaaaccttggatggatatcttctctttaaaaaaatgtaaagataatttggtcttgagggtttaaacggttgataatgcctctacaacaacaagaaaaaagataaaatactaggatagaatcatggtgggcacagtggcttctcaggaggctgaggagggaggtttgcttgagtccaggagttggagaccagcccaggcaacatagcgtaaaccctatctctaaaacaatttttagccaggtgcggtggctcacgcctgtaatcccagcactctgggaggccgaggcgggtggatcatgaggtcaggagatcgagaccatcctgcctaacaaggtgaaaccccgtctctactaaaa

SEQ ID NO: 13619 - DNA, 410 bp, Homo sapiens
gcagcagcagcagcggcgtggtcagagcgagcttcggagaagcagtggtgggttccatgtgatggtggagtaggaggcaggtctccgcggctagtcaccctgctgtggaatagaaggccagaattgatcagtctcatctgagagtaactttgtacccatcactgattccttctgagactgcctccacttccccagcagcctctggtttcttcatgtggctgcagatggcaggatttcccaaaggtttctggctgaaacatattccgtggtgtatctgtacagcagtttccttatccctgcagctgtgtttgaacaggaaagaaaaaagaagaaaaaaaacctccatacgagagtgggtctaaaggaacttcccaaacctccatgattttgcaggaaacaagataaagctg

SEQ ID NO: 13620 - DNA, 548 bp, Homo sapiens
cgttctgtcgatttttggtcattattgtctaaacaatacagcttaacaactgttttcatagtatttccattatattaggtattataagtctagagatgacttaaagtatatgagaggctgtccataggttattatgcaaacactacgccattttctatcagggatttgaacatttgcagattttggtatccataggatgtcctggaaccagtcccccactggtactgagggacagctatacttaaagactaatatatatgctctgttttcctttaaagtacttgactctacacatttcctatagctttgaagacttgtcttccttgaagcagactaaaagggggacagatgggaggatgggaagaaccacacttccataatcttaaaattattccttccttgctatgctgacaaagtgagaaaacaaatataaattatcttaaagcccagcatttaagacacaagttggtaattacctaggcttgaaactttctaatttcactggtttttttgtttgcttgctctttatttttctctggcttaaaatc

SEQ ID NO: 13621 - DNA, 414 bp, Homo sapiens
gaaagggacctggacagccatggggtggccgggatgagccccttcctctctgtgccttggtttccactgtgggataagggggccttagcatcagcgctcagagctgtggagccaggattcctgatcgggcgctgtctctgccaggccagggcacttggacaccacgctgcaggaggctggtctcgcccaagcctctgtgggaagggccgccaggctgagtggagggccagccaccagctacggtgtcttccttcgcaggtctgtccccccaggcagaaggattccagcccagggatcccccatcccaccctgactgcatcctgagaaggggggacgccacttcgggaaggttgttggggcagcacaggccctggggccctgctctgtgaccttgggcggccccctctgtctctc

SEQ ID NO: 13622 - DNA, 546 bp, Homo sapiens
gagccaccgtgcctggcctcaccattgttaaaattatggaaatcgtgtttgcaaagcaggttggcctgtttggaaaagggtgtcataatttctcaggtaactccaaaaagagaaagctacgaaaattaccttaatacattcattacagtctcagtataagattatagcttcctctcccaaagcgtaaccacaacctgacgcaggatgagttggtttgaaaataccgcatacaatatcctcttgagtagaatcataatttagaactctaaaaatgaccggaaacaaaactgtccaagtttgtttaacgtaatgtgtttcaacttatttgactagaaaacccttcattcgtgcaacacttataaatatcccatggcaaatctagttttctacgaataatgaacgaaacatttataatttaaaactaaaattgtcttctaagcagagatctacgtatcaataaaatgaagaaataaaatttccatactgttttcttcccaatacaaggattagaaggaaagggaaaagagtaacagcgagaatcaatag

SEQ ID NO: 13623 - DNA, 582 bp, Homo sapiens
tttctcagaacataatccagttgttaagtgatgcatgaccctactcaatgtgctgaatacctcactccaaaccatttcagaaaattcagatattatcaaccctcattgcactgccttccattagaaacatgggaagttgttttggaaaagatgtacctgcccctcaaccaggcccaggcgcctgctgagcctacgacagaagttgctacccctaccccaggtgaaagtacagcaggacactctttccaagtttatcatgagaaactaagcaaaccaccatccgatacccaacccaggcccctgttctacatagaagacagataggaatattcactcagattgataagaaaagcatcctgcacatctcaggatggtcaaacctccatgattgctatgactcttgaatgacaccttcccccggagaaacagacaagaggaaatggattgaaattgatgataggccgggcatggtggctcacgcctgtaatcccagcactttgggaggcagaggcaggaggaggatcacttgaggtcaggagttcaagatcaccctggccaacattgcaaaaccccatctctact

SEQ ID NO: 13624 - DNA, 109 bp, Homo sapiens
ggattattgacaacaacagaattcaaaacccttgaaaaagaaaatgatgtgtatctatattttaaccacaaatacacaaacacacttatagtaactacaaataacatct

SEQ ID NO: 13625 - DNA, 292 bp, Homo sapiens
gatctcactcccgccacagcttgggatcggtctctgctgttttacgtcctccacctcgggagcccccggtgactgtcacagcctcttgccctgtgatctgcaggttctgggagacgcacagctaagatgccaggacatcctggaagctgggaaaagatggagtttcactcttgttgcccaggctggagtgcattatcccaatctcggcttactacaacctccgcctcccaggttcaagtgattctcctacctcagcctcctgagtagctgggattacaagcacctgccacca

SEQ ID NO: 13626 - DNA, 519 bp, Homo sapiens
ggcacgagctcagtatgtctctttcaactctagtttttgaggtggggacacaggaggtccagtgggacacagccactccccaaagagtaaggagcttccatgcttcattccctggcataaaaagtgctcaaacacaccagagggggcaggcaccagccagggtatgatggctactacccttttctggagaaccatagacttcccttactacagggacttgcatgtcctaaagcactggctgaaggaagccaagaggatcactgctgctccttttttctagaggaaatgtttgtctacgtggtaagatatgacctagcccttttaggtaagcgaactggtatgttagtaacgtgtacaaagttaaggttcttgtggtttacccatctgaaatatgtttccatcacacaatttgttacttcactgaatttcttcaaaaccattgcagaagtgaggtcatccttgaaaagtggcagaaaaagaaaatagcagagatgggtccagtgcagtggcttgccactc

SEQ ID NO: 13627 - DNA, 592 bp, Homo sapiens
ggcacgagacaggcaccaagatgtccaaccgagtggtctgccgagaagccagtcacgccgggagctggtacacagcctcaggaccgcagctgaatgcacagctagaaggttggctttcacaagtacagtctacaaaaagacctgctagagccattattgccccccatgcaggatatacgtactgtgggtcttgtgctgcccatgcttataaacaagtggatccgtctattacccggagaattttcatccttgggccttctcatcatgtgcccctctctcgatgtgcactttccagtgtggatatatataggacacctctgtatgaccttcgtattgaccaaaagatttacggagaactgtggaagacaggaatgtttgaacgcatgtctctgcagacagatgaagatgaacacagtattgaaatgcatttgccttatacagctaaagccatggaaagccataaggatgagtttaccattattcctgtactggttggagctctgagtgagtcaaaagaacaggaattcggaaaactcttcagtaaatatctagcggatcctagtaatctctttgtggtttcttctgatttctg

SEQ ID NO: 13628 - DNA, 303 bp, Homo sapiens
ttttccttcccaaatcccactaaggctattttttttaaatccaggttctaggcctggttttgtcatgaccttaatttacccttcacctaatcacctttgactcagtttcttcatctataaactgaggggcttggcctcactgagttctaatgtcctttatacatttaatcttctatgagtctaagatgcaatttctctccatatgttgaattataagcctactatgtgggtataaaattccttcaatttcccacaacttatttgccatgaaaataacaaactgtgtagacttttaaatgtttt

SEQ ID NO: 13629 - DNA, 265 bp, Homo sapiens
acgacagaggcagggaaacagggcttgaaagaaagaaggatgggggaaaagaaaagagcccagcatcaaagagaagctggttttgcctggagtggccaagtctacctgacacaggcacaatctctgatctcatccacatggccaggagctggaagtactaaaattagaatccaaagtgttctaggctgggcacggtggctcacgcctgtaataccagcattttgggaggctgaggagggtagatcacctgaggtcagaccagcct

SEQ ID NO: 13630 - DNA, 294 bp, Homo sapiens
gggtaacctggagacattcagaaaatatctgtggaactcctgcattttgtgaggcactgcccagggcattggagagagagatgcctttgtggtggtcctaaaagagttcacagtctggccaggagacattgtacaaacagactataaatggctgtgcttcttttttttctaaagaatgttcagcgggagcacttgggacctacctgtgagagctgaggaaggcttcacagaagaggtcttgcttaagaggaaacatttggggccaggtgcagtggctaattttttgtattttct

SEQ ID NO: 13631 - DNA, 529 bp, Homo sapiens
  misc_feature 373: n = A,T,C or G
taaactgaaaaatgagtctaaatgcagccactttgctattttagttcttcataagactggaagcaaagcaattttactgaaatgttatcagtgaaactactcactctacaatgaaacatttgtgtttacttttgtgtttagttattttgtgtttaatatgtgtcaaatctttatccaaacagaaatggtataaagagatgagtaagacagtctgtggctcagggctactttgttgtaaaaacccagtgacaccattctgactgtggtcctactgtttattctctatctagcagcaagatctttggaagacatgttaggtaattatcttatcactctactgttcacaatcctccaagatttccacatcacttanaattaaatctgggccgggcgcggtggctcacgcctgtaatcccagcactttgggaggccaagacgggcggatcacgaggtcaggagatcgagaccatcctggctaacacggtgaaacccccacctctactaaaaatacaaaaaattagccgggcgt

SEQ ID NO: 13632 - DNA, 297 bp, Homo sapiens
cagctgatgtgggtaaagctggagctgaaagggaattccgaggcctcggtgactgcctggttaaaatctacaaatctgatgggattaagggcctgtaccaaggctttaacgtgtctgtgcagggtattatcatctaccgagccgcctacttcggtatctatgacactgcaaagggaatgcttccggatcccaagaacactcacatcgtcatcagctggatgatcgcacagactgtcactgctgttgccgggttgacttcctatccatttgacaccgttcgccgccgcatgatgatgc

SEQ ID NO: 13633 - DNA, 206 bp, Homo sapiens
ggtaatctgatctaccacctagcacgagataaaaatgtgggagccatcggcatggagagagcatttaaatgcaggagagtggacagaatgccctaaggagcccgtggagagagaagaacaggcagtgtgaatgatgtgtgtgctgtgtgtgtgtgtgtgtgtgtgtgtgtgtgtgtgtctgtgtgtctgtgtgtgtagtgttctct

SEQ ID NO: 13634 - DNA, 141 bp, Homo sapiens
gtaaatttaacagacccaagagattatgaaaaggacatgtttttatattatgttttggagccagtagtacttatgataaagacagctaaaagctgcataaaagtcagtataacatgaatcctaagagtttgtcacagctta

SEQ ID NO: 13635 - DNA, 90 bp, Homo sapiens
ctcttccccaattccggcaggttccatgcgctccaaactttgcttatgccggtccttcttcctgaaatatcctttcctccttgtctaact

SEQ ID NO: 13636 - DNA, 92 bp, Homo sapiens
taatggttttgcaagtatgttgaccatattcccaaaccttcagataatttacaagaatacaggcatctgggccgggctcggtggctcacggc

SEQ ID NO: 13637 - DNA, 527 bp, Homo sapiens; identical to SEQ ID NO: 8402

SEQ ID NO: 13638 - DNA, 571 bp, Homo sapiens; identical to SEQ ID NO: 8404

SEQ ID NO: 13639 - DNA, 635 bp, Homo sapiens; identical to SEQ ID NO: 8406

SEQ ID NO: 13640 - DNA, 363 bp, Homo sapiens; identical to SEQ ID NO: 8408
  misc_feature 265, 266: n = A,T,C or G

SEQ ID NO: 13641 - DNA, 524 bp, Homo sapiens
ggcacgagccacttctcttcccaactcctcaatagctttctcttttgctcagattaaaatataaatactttgataggtcacagaagtgtatataatcctacagaagtacctttatagtctcatttctacctcacttattctacttcagccacattgatgtatcaggctattctaaaacatgccaagcacatttgcacctcaaggcttttgcgttactacccctatgcctgtaatgttcccccatatgtaaattagatcacaaaactcaatgaagaggaaatttccacatttgtttataacatgttatgtacacagatgcctgtattaatagaaaaaacatctagaagaaatatcagaatgtcaacagtggttatatctaggtagacattttatttatatttgtcagtatttttggtatttttgccaaaagcaaaaattatttctgccctcaggaaacatttattcatttttatagaaagattaaaacagctcccttccttggcttcttcctttatcctctttct

SEQ ID NO: 13642 - DNA, 462 bp, Homo sapiens
tatttacttcccttatctttgggatctgacactaactctgcaacttactgtttctgtaccccattttcttacctaaaaggaggttaataatatgactcatctcacaaacttgttgcgaagactgaataagataaagcgtgcaaagtcttaagaagaagacatggcatttagtaactaataaaaaatgtcacctctctcagtatcattattaccttagaaaaagtccttctcattttcatcagaggccaggcacatagttagggttcaaaatgcagttgacaaactgactgaattagcatagtctttaaaaactggaccctggaaccatatcccctgtttgtccttccctgccccatgggtaagcaaatatctccactgcctgggctcaggagacacccatgtgtaaagtatttctcagataactactcatgacccggtgacacatcaagagcaaatatattt

SEQ ID NO: 13643 - DNA, 223 bp, Homo sapiens
ggcacgagagatagagagagagagagagagagagagagagagagagagagagagagagagagagagagagagagagagagagagagagagcgccagcacactctcttgggggagacccccctctctctcccctctctgtggggggcgcgtgtgtttacacagaccccccctctctctgtgtgatatattttttcacacagagtgagagctctctctcttggtg

SEQ ID NO: 13644 - DNA, 545 bp, Homo sapiens
ggcacgaggttaccttttgatcttaaggaactgttttgattgggtcacttccttgcctaaaattccattgattgttcattgttaattctaaaatagagttcaaatttaaaggcatgtaagttcccctgtaacggatttcctctactcccccttccgctgtaatctcccatttttttactgaaatgcttcagtgagcatgggtctttagaggtcttgatatacaattttcctgaagcaggaataccttgctttcctctactagtttaccacaattacagctctcttttaagcctcagaaaaaaatctcacttccgtcttgaagtcttaatccacgctttttatatccatgtgcctactccttctctgaaatctcctatggtttatctttttattcatttaatatcccacgaattgattttattatatattttttatggttgcatgtggtctttctagttatagcagtatacacatacatgcataaatacatatacacctatgtaaatgtgtgttgggagtatgtattcacacacatacatataccc

SEQ ID NO: 13645 - DNA, 389 bp, Homo sapiens
cgttgctgtcggtttcgtacgtagcagagcagctccctcgctgcgatctattgaaagtcagccctcgacacaagggtttgtcttttgattttttttttcctaattgtgtgaacctttctgaaacagaaaggaactttaaaagtgtggaagggaaagcgaattgagctcattaacacatggaatgtaattatgcacaaatgtattcattacagtatttcagctgttggaatgatatagacacagttaattccaaagcataaagaaacaattaccctcaaagtataaatacaatactaatcacatggttcagttaacaagaaccatatatgagttatacttgaatcaaaagtgtaggcagggactgggcacagtggctcacacctgtaatc

SEQ ID NO: 13646 - DNA, 679 bp, Homo sapiens
ggcacgagcacataactgagctcaagctcttgccaaacaccaacaagcaagatggttgcaacctggcaacattgaatccaccacccttgggctccctctggaagccccagcaccggggggcttttgggcacagggtcagtggtagccatcttagacactgacatttggctttgtcgtcaatttcatcaccctccttgaggttactgtgcagtttcaaccagcattttatcctagtgaggtcattatcaggagttgccatatcatctctccagtacctaacatttctcatccacttcaaaagctgttctgactgccagctggctgatctaagctcctgaggaatgtctcctctcaaaggaatttttccctccaaaggccccctgaagtcctagttggcattggcctggcacatgctttatgttaggcctcccgttgggatggctgagaatcatgaaagacagatcctccgctagcctctgtgggtcaagtttctggacaccaagtctctgggaactagtgtttgattttaaatggcatgtggcccttccttgtttcagtgacttagaaaagtaaaagccatttaaaaaagttagcaagattttttatcgacttcccaactgggcttccagccttgttgaatgaaatcatctatctctgattgggcgcaacgaactgcatt

SEQ ID NO: 13647 - DNA, 524 bp, Homo sapiens
gctctttctttctgctctgaagccgtggatacagaaatctctgcaagcaagtggctccagagcatattgcaggacaagcctgtaacgaatagttaaattcacggcatctggattcctaatactttttcgaaatggcaggtgtgagtgcctgtataaaatattctatgtttaccttcaacttcttgttctggctatgtggcatcttgatcctagcattagcactatgggtgcgagtgatcaatgactctcaagcaattcttggttctgaagatgtaggctctagctcctacgttgctgtggacatattgattgctgtaggtgccatcatcatgattctgggcttcctgggatgctgcggcgctataaaagaaagtcgctgcatgcttctgttgtttttcataggcttgcttctgatcctgctcctgcatgtggcgacaggtatcctacgagctgctttcaaatctaagtctgatcgcattgtgaatgacactctctatgaatacacaaagcttttgagcgccaca

SEQ ID NO: 13648 - DNA, 623 bp, Homo sapiens
ggcacgagggacaagagaatacttgttgttgcatgatatctcagaatcggaatttctaactgaagctgaaatcatttgtgatgttgtatgcctggtatatgatgtcagcaatcccaaatcctttgaatactgtgccaggatttttaagcaacactttatggacagcagaataccttgcttaatcgtagctgcaaagtcagacctgcatgaagttaaacaagaatacagtatttcacctactgatttctgcaggaaacacaaaatgcctccaccacaagccttcacttgcaatactgctgatgcccccagtaaggatatctttgttaaattgacaacaatggccatgtatccagaggatcattacagagacagactctcccgagacatgggccacactgatagaatagagaatttgagaaaaatctgggtctttctaaaaactgctttgcacgtgacacaagctgacctcaagagctccacgttttggcttcgagcaagttttggtgctactgtttttgcagttttgggctttgctatgtacaaagcattattgaaacagcgatgatataaaaagaaatactgtccctaccaaaaacaaatacttttatgtacattctgaatgc

SEQ ID NO: 13649 - DNA, 210 bp, Homo sapiens
aaatctgtcatgcagcagggccctgaatcttccacccataggtacctttcatttccttaactttagagttcatcttagtcagtaaaggggcatctatttttgtctctcagatcacagttgaaaatactttcttctggggaatgagatggaattgggcaagggattacaggagtactataattttaaaattgttattacagtacttcacta

SEQ ID NO: 13650 - DNA, 243 bp, Homo sapiens
tcgccatctggacaagagaagaaacaagcctgagagaaaggagtggctatcagcatcagttcctgcttgtcgaataaagatctgaaagaagctcattggtttcagcaacaaggaaacattaataacatttacgaaaatagttttgatggggagataaagatagaaagacagtctttggtgttgccaactgatatggtttggctctttgtccccatccaaatctcacattgaattgtaatcccc

SEQ ID NO: 13651 - DNA, 533 bp, Homo sapiens
tcacatttctgcccatagggttcttccctcccaccccaacaggtccctaggtatcctgtaattttaagaaacggtttgcaaacctgagtgttcctcagacagagtggcctgtaatgagccagcccaagaggctgacacccaggtgcctccaatctcatcgtgtgtggtgcctaacagcactatctgggtaaatccagaataggttactcatctgtttacatagctaaggtagaagtggacaataagacctcaagtataaggatgacagtgttaggattattagatgcatctactgatagcccgtaaaacgtgtaagacagaagcagaaaacaaacttacttgcacacactagtattaatattgtgacagctaacagccagttgtttctggcttttaagaagttggggctggacgctgtggctcatgcctgcaatcccagcactttgggaggccgaggcaggtagatcactcaaggtcaggaaatcgacaccagcctggccaacatggcgaaaccccacctctactaaaatacc

SEQ ID NO: 13652 - DNA, 375 bp, Homo sapiens
ctaatttttgagaacagcaagccctatttgaccactctcttcagcctgtgtgttcctgctgttttgaagtaatcaaatgctgtgcatggtattttacctgagctgcaacctgttatggacttgaacttctgtttaagttgaaagcaagagtccctgagtataaaggaaaaacagcaaaacaaaaagcaaacaaaaaaaaactgcaaaagtctaaaatacccattggtgatgttttttaaaaaaatcttgctttcagctttcaggagttaatattctttgttttaatttgataattggatatggttgatttatattgggtttaaactgtggagctttcatgtttactgtaatttagtcttaaaatattttttactt

SEQ ID NO: 13653 - DNA, 173 bp, Homo sapiens
ccaaacttggaggtggccgcttccagaccatggaggagaagaaagcattcatgggaccactgaagaaagaccgaattgcaaaggaagaaggagcttaatgccaggaacagattttgcagttggtggggtctcaataaaagtttgtttcagtggaaaataacttttattgagac

SEQ ID NO: 13654 - DNA, 520 bp, Homo sapiens
ggcacgagggaggctctctgttaaagatgcttttgcccccttaatacagcaatgacagcactgaccgaagaggcagccgtgactgtaacacctccaatcacagcccagcaagctgacaacatagaaggacccatagccttgaagttctcacacctttgcctggaagatcataacagttactgcatcaacggtgcttgtgcattccaccatgagctagacaaagccatctgcaggtgtctaaaattgaaatcgccttacaatgtctgttctggagaaagacgaccactgtgaggcctttgtgaagaattttcatcaaggcatctgtagagatcagtgagcccaaaattaaagttttcagatgaaacaacaaaacttgtcaagctgactagactcgaaaataatgaaagttgggatcacaatgaaatgagaagataaaattcagcgttggcctttaaactttgccatccttaaggagtgatggaagccaagtgaacaagcctcagtgacacaagtcaaattc

SEQ ID NO: 13655 - DNA, 94 bp, Homo sapiens
ttcgataggtagccaacgcattgaatttccttcctttacattcatggttctactccctgatctcactatgattacgttgggcacaaccttcctt

SEQ ID NO: 13656 - DNA, 69 bp, Homo sapiens
gaaatggacataaacccgggtgtgaaaagccagggaatgaagcccgcgggagcggggaatctgggattc

SEQ ID NO: 13657 - DNA, 68 bp, Homo sapiens
gttgttgaaaacaactctgtaactgaattttctgaggagaaaaacagaactgaaaattacaacaggca

SEQ ID NO: 13658 - DNA, 445 bp, Homo sapiens
aaacatctattctgatgtcagaggactatctcagaaccagcaaatacctcaaaattctgttacgcctaggagaggaaggagaaagaaagaagttaatcaggacatactagaaaacaccagttctgtggaacaagaattacagatcactacaggtagggaatcaaaaagattaaaatcatctcagctgttggaaccagcagttgaagaaactactaaaaaagaagttaaggtttcatctgttacaaaaaggactcctagaagaattaaaagatctgtagaaaatcaggaaagtgttgaaattataaatgatctaaaagttagtacggtaacaagtcctagcagaatgatcagaaaattgagaagtactaatttagatgcttctgaaaatacaggaaataagcaagatgataaatccagtgacaagcagctgcgtattaaacatgtt

SEQ ID NO: 13659 - DNA, 236 bp, Homo sapiens
gaatatgatactttggaggggaaatgcttggcgtgtgtacaagtatgaggagaccaacttacacaacccatcaaatacttatgctcctcatagccaaggaggtattccacctcctgctggaatgtaattaaagggagaaacacactgtatgaaatatatgtctatatcatgacttgttgccaacatcttgaggcacattatttgtttccaataaaagtaatgttttttttttttaa

SEQ ID NO: 13660 - DNA, 559 bp, Homo sapiens
caccatccacccagttaacatcaggttggccttgagaatagagtccactgttcacactggggtcctagaataggagaggctgcgccagtacaggatggggccccggtgtgcccgggatccgtccggccgagaagcagcaagtccctggaggaaactgcaccagggaagatggtcagaaagaccagcctgcatggggtgtgagctgctgggccgtgctcgccaccacccgcctctctttcctctgcaggacacagaaggctctgccatgtggctgtgctctctgtggtgtctggaatattttcttccatttcctcactactgaaatctttccctttactaagaaatgcctttaaaatggaaatgtctttgaaacctgggtagcagttttaataactcccttccaccccatgtctataactagcattggggtccccaggagcacccccactcagcgattcactgggaggactcctggagctcatgcccagcaggatggccatgatttgttacagagaaagcacgcggagcatggtcagcagagcgagaaggtggaggagag

SEQ ID NO: 13661 - DNA, 573 bp, Homo sapiens
acagggtcccacactttgattttgcaaattacgcagcctgtcccatgtggagttttagatttgaattattattttattagtatttttaggctatatatcttcactctaaaaaatgcacgtgtatgtattagttttataagtgagatttacagcagtcattgaacttcttgcagagctttgctgccagtcttaactgtagggtgtggtctgtcagccaacaaacagctttttaaagaatgttgcatgttgtgtgagagggaaaaaatacgacacaaagggcctttaatcaacatgcttgcaaagccactctcacagagtagacgccttattgggtaatttctgggtcccaagccccatgctgaccacaaggatacagagagaaacagagcacagcccctgccctcaaggagtgccttgtctagttgaaatctgtttcgtaactttctaaacctcaagccactctaagaaatatgcaacccagaattcagtacacatagagataatacacacatagaaagatgaaacagtaggccgggcatggtggctcatgcatgtaatccctactttttggga

SEQ ID NO: 13662 - DNA, 393 bp, Homo sapiens
ggcacgaggagatagagagagagagagatagagagagagagagagagagagagagagagagagagagagagagagagagagagagagagagagagagagagagagagagagagggcactctcttgtataaatctcttttttgtgtttctctcttccccccccctctctttctctctcttatagagcgacaccctctctttttgtcccctctctctcgcgcccccgtgggcgctctctctctctctctccatttttcaccacactccccacacatatatatatatgagcccccccgcgcgcgcgtctctctttttttttgtctctctcgcgcgcctgtgttttgtctcgcatcttttccccactctagagtgagagcgcgcccccacacctctc

SEQ ID NO: 13663 - DNA, 96 bp, Homo sapiens
ataaagaaggtaagaaacctaggaccaaagcacccaagattcagcgtcttgttactccacgtgtcctgcagcacaaacggcggcgtattgctctga

SEQ ID NO: 13664 - DNA, 445 bp, Homo sapiens
gtcaattgggcacgagggcgcccaggccgccgcctgccaggctgtcgggcgtcatggtgccggcgcccatccaagacctggaggccctgcgcgcgctcacggcgctcttcaaagagcagcggaaccgagaaacagcacccaggactatcttccaaagagttctggatatcctaaagaaatcttctcatgctgttgagcttgcctgcagagatccatcccaagtggaaaacctggcttccagtctgcagttaataacagaatgcttcaggtgtcttcgcaatgcttgcatagagtgttctgtgaaccagaattcaatcaggaacttggatacgattggtgttgctgttgatttgattcttctgtttcgtgaactgcgagtggaacaggaatctctgttgacagcttttcgctgtggcctgcagtttttaggcaacattgcctcacg

SEQ ID NO: 13665 - DNA, 611 bp, Homo sapiens
ggcacgagctgaagtatgtctggcaaaacctagaactgcatcctagccatcactgtaccttctgccctccctgctgtctcctctgccagttacagttaaaaggttgtgggtgaggacgctgggcagagtcccaggcgtctgctgtcagctccccagcccggcctgcctgccgagccatctgggcgtcccacggtggagagtgtggtgcttgtgacgcggtggtgctgggagccatcctggtggcagatgtgggctctcactgcaagtcagtgtaagtccccagggactgtcagcagcacgtcctgctgcccctctctctgcagaagccctggtaacctgcgtttggaaaaatctctaaggatttctgaggagctgtcaggccatgtccttgtccaccctgtgtggggcacggcttcgacatggctctgctcccgtcgtgggctgagaaggagcaggtggggctgtgccttggaaaggaggccctcccgacatgcctttgtgcgaggtccctgtccatgctgtctccatcccggagccttacggcgatgggtggccacagagcctattccaagagtctggtttaaggctgggtcttcccatcttcacctctg

SEQ ID NO: 13666 - DNA, 503 bp, Homo sapiens
aaatgcttcttaaagtctggctttataaccgttaaaaatctacattgtagattgtagataaccaagtgagcattataatacaaaataattttaagtgtaataaactaaagtataatcaaagtaaatgcaggtattggatttgtggtgttgccttgccttgcatgatgctgggggaaaaagagaaaagaaatggttttctttttgtactttcattcagtgtagagggaaaaaagcatgtattgggccaccggaagacaagctaataaataggctggaagtaatattctaccagcaggaactcaacagctccagttaaatgctttgatatagtggctcctttgcagagccaaaacaagatttattaaatttccttcaaactgtttatctttaaaacaaatataaggttttaattatactgctgaagcaaatgtgaatgccaaagactacgttttgcagttttgctttcctcccaataaatattaatgtatgtaattctagagggt

SEQ ID NO: 13667 - DNA, 79 bp, Homo sapiens
tagcttttgcaaacagctctctctctccatgaacagaagcaaaaaatgacttgtttaaaacacaatcaacataactact

SEQ ID NO: 13668 - DNA, 66 bp, Homo sapiens
aacggtgtgaacccgggaggcggagcttgcaatgagccgagatcgcgccagtgagcgagactctgt

SEQ ID NO: 13669 - DNA, 465 bp, Homo sapiens
ggcacgaggcaacctctgcctcccaggttcaagtgattctcctgcctcagcttccccaatagctgggactacaggtgtgcgccaccactcccagctaatttttgtatttttagtagagacagggttttgccatgttggtcaggctggtctcggaactcctgacctcaggtgatccacccgcctctgcctcacaaagtgctgggattacaggcatgagctaccgtgcctggcctaaaccttacgcttttgaggttgagtgcaggccttgtgataactaagtgctacttttgacgagccttcaacaagctgcccagtcctctcctcagcagacgcatcaggttgtagttgcatctttacagtggtctttccttttattaaatctatagcagtgaatatagatttgattcaacttttagttacgttctctcaagaatcctaatcaactttcagttagcctcttaagaa

SEQ ID NO: 13670 - DNA, 457 bp, Homo sapiens
ggcacgagagagcgagtctctctttgttgcttaggtttgtcttgaaatcctgggttcaagcaatcctccctcctcagcctcccaaaatgctgggattacaggtgtgagccaccacacctggcctctactttcttatatttccttaaatagatttcctttctttttggattaagaaaaaataaacagaaaattaaaatttgaacatattataaaaatgaaagataattgtaaaatcttggtttggagagtgtctctctgagcccagaaatcatccagaaaaatggacagatttgactgcatcacatttaaaaactttacaatgatgaaaaatacaagtgaagctattcatacaatagattaggaccaagtatttttaacatgtattatagacaaaaaattaccatccaaaatatagaattgttacaaaaattttaaaaacatggttaaaaaatgggca

SEQ ID NO: 13671 - DNA, 193 bp, Homo sapiens
agatcaaatccactcccaaagagtaaggcagattagagaccagaaagaccttgactacttccctacttgcactgctttttcctgcattgaagccattgtaaatctgggtgtgttacatgaagtgaaaattaattctttctgcccttcagttctttatcctgataccatttaacactgtctgaattaactagac

SEQ ID NO: 13672 - DNA, 484 bp, Homo sapiens
attccgttgctgtcggtgcggcgtctgatttctcggtgctaacctggcagctgtggggcccttaggagccccccaccgagggtggacacagtccctttccttcctgcagatgcctaagcaggaggagggcttcctgcctgtttggcaaagtcccacgcagaggccaaagatgaggcctgactcggctcctccctccacatcagccaaggcatcataagttgggccagggcggggtcttccctgctcgattttggacgaagcctaagtagaccccctatgccctgccccagacctggctctttcctaaccccctcaacggtgggaggaactggcagagggtgcgcctggccacagcctccccgcatctaaaggccccttcatttcttgaccaaaggtgctacgataacctgccgtggaaacttccacttgtgcgtctgccccactcgctgtgtttgtccgtgggttcatacatgcattgggtgct

SEQ ID NO: 13673 - DNA, 416 bp, Homo sapiens
ggcacgagccgacgcggcgaaggagcgcgccatggagcatgtgacagagggctcctgggagtcgctgcctgtgccgctgcacccgcaggtgctgggcgcgctgcgggagctgggcttcccgtacatgacgccggtgcagtccgcaaccatccctctgttcatgcgaaacaaagatgtcgctgcagaagcggtcacaggtagtggcaaaacactcgcttttgtcatccccatcctggaaattcttctgagaagagaagagaagttaaaaaagagtcaggttggagccataatcatcacccccactcgagagctggccattcaaatagacgagccagattctttggatcggaggcaggaatcctggagaagatgttgagaggtttaagcaacaaggtgggaacatcattgtggccact

SEQ ID NO: 13674 - DNA, 335 bp, Homo sapiens
atgatgggttgatgggtgcagcaaaccaccatggcacatgtatacctctgtaacgaacctgcacgttctgcacaggtatcccagaacttaaagtaaaataaataaataataataataactgaacacatatgtgttaattgaacacatatgtgccaggcactcttccgtgtgctacatatcgagtaatccatttaatcctcccagcatcctttagaatgggtgctcttgctatagttaccttacagaggagaaaacagagacacagaactgttaagagccttgactcagggccttacacctattaattggggaatatggaatgtcaggaaccatgt

SEQ ID NO: 13675 - DNA, 619 bp, Homo sapiens
aggcaagaaacatagaccagtaatttacaaatgggtaaaccacatggttaatcaactcagggagatgcacatcttcacagtaaccagggaaatacaaagaagaactacaatgaggttttattttatgtttgtcaggttggcaaatacttaaaaatgtggctgtatccagagttcttgaggatatgaacacctataccctgattcttggagctattttggaaaataatttggaataaaaagtaaatatgaagatgagaatatcccataataataattatttctagttatatatcctaaaggaattcttgaacattaaatattttgtaaatattgtttgcaatagtaaataaaaacaacataaaaggccagccgacaagagtggaaaataagttgagctatggttatacaattgttataaaatatttgaaaataaaacaattagaagtatatttatgaaacatgagtgaatttcaaaatcagaacattgagtagaaaatgcaagtaagaggagcatttaatgcatgatgtcacttttgtaaagtttaagaacacagatatcaataaaatattctaagagttgagaaaggagagtagaattagaaaatgacataagcttgac

SEQ ID NO: 13676 - DNA, 69 bp, Homo sapiens
  misc_feature 69: n = A,T,C or G
cagagtgagactccatctcactctccctagctctgactgctggcatgcacctgtagttccagttattcn

SEQ ID NO: 13677 - DNA, 358 bp, Homo sapiens
atctccttcaaatatctggtttattattaaatatatgtgaaactagtggacaatttgggagaggtcaagagaatgaaacagatatgttcactattacttatgaaaattattttatgaatagccaagcatatatatcctcttttttattgatcaaagatgctttacatctcattttaaagtaataggcttcataatttcacacagctcaatagtgtaaaaagaatgtatttcttaaaataatgtagggtcggccgggcatattggctcatgccactttgggagatcaaggcgggtggataacctgatgctaggagttcgagaccagcctggccaacgtggagaaaccccctttcaacta

SEQ ID NO: 13678 - DNA, 470 bp, Homo sapiens
tggagctggttcctctcgtctttatgacccgtgaaaagcgcaccaacacgaagacacgcgtgaaaggaccccatctcctaaccagactgacaagcaagggattttttccactcaccgtcagtgggatggttctaagcaccgaggccaacccatttcacacgattatttcacaaaaagaaactttctgtgggacgtgcctgggcgactgaaaagacagccagcaaaactgagaaccttgttcgcaaatccgtaccctctcccaaggcagcctcagaggcccgagggctgaggatccagacccgaaagccactgtaccttctgtaggatcaggctcaaggactaagggggtaaaaggtgccctttcccttcctaagcagaaaattctgtaacccaaccttatgtgtgatcatttaaaaaaaaaaaatcagctgggtacactggctcacgcctgtaatcccagcactttggga

SEQ ID NO: 13679 - DNA, 417 bp, Homo sapiens; identical to SEQ ID NO: 8636

SEQ ID NO: 13680 - DNA, 624 bp, Homo sapiens
ggcatgagccactgcgcctggcccagttttcttttttaaaagaaataaaacttaccaataaagtcagaatgtttgttagaatctttcattcctgttaactccagaagtaaccactattatgaatttggattgtatccttccagagcacaattttactatacttttacaatatgtgtggttttccatcaacaatatatagtatttttatatgcttttacatttttatataaatcttatactgtagttgtcttcttgcactcaatatttttgaattcattttgtagatgtaatcaatgatatgcatataccaaattttatttattaatttccttattgatggattaagttgctttaaaatattttgctattagaaacaatgctgtaatgaacagctttattcacatctccttgagtatacatcaagatacatcaagattatacctaggatgttgctgagtgcagtgtttcacacctgtaattctagcactttgggaggctgaggcaggtgaattgcctgggctcaggagttggagaccagcctgggcaacatggcaaaacccatctctacaaaggatagaagattagctaggcatggtggcatgtgcctgtagtccgagctactcg

SEQ ID NO: 13681 - DNA, 217 bp, Homo sapiens
cctcccgagtagctgagactacagttgggtaccacctggccaggctgatttttgtatttttagtagagatagggtttcatcatgttgtccagtctggtcttgaactcctgacctcaagcaatccgcccaccttagcctcccaaagtgctggaaatacagaagtgagccaccgcgcctggcctaataagtatagatagtatttcacttttatattcct

SEQ ID NO: 13682 - DNA, 280 bp, Homo sapiens
aaagtctctacacagtttatacctccagtattgcaaatgatgtaaagatgaaatacatagcattgggaattgtaaaaaatcatgctgacaattgaaaatagtgagaacaactgaaaaagaaaaagaagaaagctgaaaaaaatcaacatgtgataatgtgttattacagggagagattatgggcaattgcatggagatattccttaagagctggttggctttctccatcattaactatattttgatgccctacgtcacaatgaatagctgcttttttttt

SEQ ID NO: 13683 - DNA, 537 bp, Homo sapiens
ggcacgagggaggcagctcccaggagtcgaaggcccccaggggcaggtccaacccagtctctgctcagcttggccttaacggcggcacccccagatctccatccagttcctggtgtacaggcgcagcaccgccgcctcggagcttgagcccctcctccccagctgaccagaaccaggctgagcgcaggaggacaggcaccaccggatgccacaccaggcaggaggaggtgtggacagtgatggtacggcggccctgcatcagcctgcgggtggcctctggatcctccgtggaccgaaccgtccccccaggaacacaccttcaggtagaccccgaagcctcaaggccggggctggagcggagaccccagggcctctcaggagacagtgaggctgcccctcctaccacctacctcattctgcctactcaccccaggggccacagccacagcctgctggactcaggactgtcctgtcaactccagacaactgaataaacaggccgggtacagtggctcgcacctgtaatcctagcacttt

SEQ ID NO: 13684 - DNA, 627 bp, Homo sapiens
ggcacgaggctgtactgcccttcaggacaagcttcttgaagaagaaaagaaacagatggaacatgtacagagagttctacagagattgaaactggaaaaggacaactggcttttagcaaaatctaccaaaaatgagaccatcacaaaatttctacagctgtgtatatttcctctttgtattttttcagcaattgatgctgtttactgtgctcgttttgttgaattggtacatcaacagaaaactccaaatttttccacacttctttgctatgatcgagttttctctgacataatttacacagttgcaagctgtactgaaaatgaagccagtcgatacggaaggtttctttgctgcatgttagagactgtgaccaggtggcatagtgatagagccacatatgaaaaggaatgtggaaactatccaggattccttaccatattacgggcaactggatttgatggtggaaataaggctgatcaattagactatgaaaattttcgacatgttgtacataaatggcattacaaactaaccaaggcatcggtacattgccttgaaacaggcgaatatactcacatcaggaatatcttgattgtgctaacaaaaatacttccttggtacccaaa

SEQ ID NO: 13685 - DNA, 478 bp, Homo sapiens
ggcacgagcggaaacaaagcccagggaagatgtctccatgaccagttgtgaaccctttgggaaagaagggatactgataaaaattcctgctgttatttcccacagaacagagtctcacgttaaaccagggaggctcaccgtccttgtgtctgggttggaaatacatgactccagttctttgctcatgcacaggtttgaaagagaagacgtggacgacatcaaggtccactcaccttacgaaattagcatccgccagcggtttattggaaagccagacatggcctatcgtttgatatctgccaagatgccagaggttatccccattttagaagtgcagttcagcaagaagatggagctgttagaagatgcattggtgctcagaagcgcaagaacctcttcccccgcagagaagagctgctcagtctggcatgcagcatctgggctgatgggccgtaccctgcaccgtgagccacccgca

SEQ ID NO: 13686 - DNA, 550 bp, Homo sapiens
ggcacgaggtggcgcgtgcctgtagtctcagcctcccaaagtgctgctgggattacaggcgtgagccaccactcccggctaagttagtatttctttaatcttaatgctttaaactaagccacttggatcctgaataatttaaatcttgagctacattggtaagtaataaattatttaaggccaggaattcctgtagttttcatggagtctgtagctttattaaaaaataaatcactgccaggcttcattcttccatatgatcctctaaaaatggacacttcctctgaatgctgtatctcatggcacctggtccaactagaaatggtcaaggaattcatttggctccttgatacatcagtcctcaatattactttctaggtattttatggccagattgcttatatgagtggtcttttggtttggtagtaggtttttatttttaatttctgtactaatgaaattcctgactttaatttctgaaaaccaaaaactctccaagtgtatttatttatattttttttaatagagacgaggtcttgctatgttgccc

SEQ ID NO: 13687 - DNA, 561 bp, Homo sapiens
ggcacgagctcaagcagaccacctccttctatgccctgctcacctgcggtatcatcatcgggggcttctggcttggtgtggaccaggagggggcagaaggcaccctgtcgtggctgggcaccgtcttcggcgtgctggctagcctctgtgtctcgctcaacgccatctacaccacgaaggtgctcccggcggtggacggcagcatctggcgcctgactttctacaacaacgtcaacgcctgcgtcctcttcctgcccctgctcctgctgctcggggagcttcaggccctgcgtgactttgcccagctgggcagtgcccacttctgggggatgatgacgctgggcggcctgtttggctttgccatcggctacgtgacaggactgcagatcaagttcaccagtccgctgacccacaatgtgtcgggcacggccaaggcctgtgcccagacagtgctggccgtgctctactacgaggagaccaagagcttcctctggtggacgagcaacatgatggtgctgggcggctcctccgcctacacctgggtcaggggctgggagatga

SEQ ID NO: 13688 - DNA, 580 bp, Homo sapiens
ggcacgagagcacccatcagtacccagggtatccagccggcccccattgggaccccagggatacagcctgcaccacttggcacacagggaattcactcagcaaccccaatcaacacacaagggcttcagcctgcacctatgggtactcagcagcctcagcctgaaggaaagacttcagcagtggtgttggcagatggagccacaattgtggccaaccctattagcaatccattcagtgctgctccagcagcaacaaccgtggtgcagacccacagccagagtgctagcaccaacgctcccgcccagggctcatcgccacggccaagcatactccggaagaaacctgccacagatggaatggcagttcggaaaaccctcattcctcctcagcctcctgatgttgctagtcctcgagtggaaagctctatgcggagtacgtctgggtcacctaggcctgcaggtgccaaacccaagtctgaaatccacgtgtctatggccactccggtcactgtgtccatggagactgtatccaatcaaaataatgatcagcctaccattgccgtccctccaactgcccagc

SEQ ID NO: 13689 - DNA, 369 bp, Homo sapiens
ggcacgagacagaaggtctgacacaggaactttgagaagacgtgacagcaatcccttcaccttttgaattgtcatggagcctatcaaaagacaagaaaagtccattcgttctctcaaatgacagttacctgtaaaactagctcatgtgatgagaccacagtatcattgcaatgatagctgtatctgtctttttttttttttttttttggaacgggcttactttctttcttaaaaaagctttggttttgccccccagctggaaggcaaggggggaatttggggttaatggaaccctcgtttcccgggttaaaaaaatttttctgcccaaaccctccggagaaggggggcccattacccccccccgtttat

SEQ ID NO: 13690 - DNA, 546 bp, Homo sapiens
ggcacgagtctgatcatactcactgggtcagcaacaccctactgaccttgtccagaatcccacatcccagttgatatcagggcaatcagtttcctggctgttttccccaatatcaacccgggcttacagaagacagtcaccacagagctcctgccaggagttcactcattcgtgcatttcttccttttttttttctttttgagatggagtctcgctctgtcgcccaggctggagtgcagtggagcgatctcggctcattgcaacctccgccgcctgggttcaagcgattctcttgcctcagcctcccaggtagctgggatagcaggtgtgtgccaccacgcccagctaatttttgtatttttagtaaagatggggtttcatcatgttgcccaggctggtctcaaattcctgacctcaggtgatctgccctcagcctcccaaagtgctgggattacaggcttcagccaccacacccagcctcattcatacatttcttattgttgttgtttgagacagggtctttctctgtcacccaggatggagtgc

SEQ ID NO: 13691 - DNA, 641 bp, Homo sapiens
ggcacgagacacggggcctgaggttttactccagaaaagcagaggagtggcaaccttggcttggggtttggcagcccaggaaaggcagggaggagagctcaaagccggtttcatgtttcacccaaggtctaattgtgggagaggacaaatccagatcccctgtttgacagaattagttcacaaatgtctcttggcaaaaacatgtgacacctaaccatgataattgacttaatccaagaaagagctctgtagggcagagcaataggaaatctctctttcgttatggaaaaaaaataatccctctacatagaaactgagtgacatgtaaaaatgtgtagctaagtcagggagttacttcctaagagcctgacgctctgcttttcatcaaaaggaaaaaccagcgtgaggcagaggcgagggaggtggaggtgagtggatgatgtgctgagttagggatgtttatatgccgcaaaggtttggttggtaggcttcgcgctaagattagcctggctttgtactgaaaagggggaaggacacatagtgacacagatccttctggtctttcccaggaggtgtgacctaatgaggtttgttgtgagaataaagcaatgtggtttcacatatattatctatcataggct

SEQ ID NO: 13692 - DNA, 390 bp, Homo sapiens
ggcacgagtcccagctacaggaggctgaggcaggagaattgcttgaacccaggaggtggaggttgcagtgagttgggatctcgccactgcactctagcctgagtgacagagcgagactctgtctcaaaaaaaaataaatgaataaaaaataaaacagcaactcttgcagatttcccgaatgtattggtcccagagaacactgaaaataatgtcatgttgttaacaccagtgggagtttgggaaataattccagctctttaatacttctttcagcttcagattaagtgaaatgagtttcacatatttcaatatatgaaattttatgatgacacataaaacaggccaggggttattgaggacacatctgtgagatagtgggcaatgctactg

SEQ ID NO: 13693 - DNA, 601 bp, Homo sapiens
ggcacgagccggggcggggcggggcgaggtcctagctagctgggttagtaagcggcgcgagcgtgcgagtttctgtcgcgcccgcgtcgtcccagctccctggactaccagtattgtcgcccacgtgggcttctctttcgtccgctcaggcctcacttttctccgtaaacaccccggcacgatggagcggccccagcgttcgggagcggcccgggagcggaaagcggcagtgtcctgggagcctcgaaagccgcaggggcggcagctcgcctcggaatgacctctgacggaagaaataaaacggggcctgggacgcttgcacgaaagaacccgacaaaaaccagagcccgcactcactctcgtactggggaggtggacttcagggagggttatctggaggaggaatctctcaaagtacaacacaggagaaagacagtatcgcaatacagaaattttattttttattttattattattttcctgagaccggagtctcgctctgtcgcccaggctggagtgcagtggcgcgatctcggctcactgtaaactccgcctcccgggttcacgccattcggctgcctcaccctccacagtagctggg

SEQ ID NO: 13694 - DNA, 324 bp, Homo sapiens
cctctcctacaccccagggccttgtcatcagactccctcagctccagacctccctgtgcagtaactcccccctcaaagaattcacatccctggacagcagtggaccttttaaactataaagcccattctgctcctactttcagaagatcctaccaagtttagagaagaaggtatctaggattgaaagtacaacataagaagatattcagaatacaatagaagctgttctaagagaaaaaatgtgtagctgtatagttttaggtgcatttgtgagaataataagaaatttaaatctttttaacctctgaagattaccatttccta

SEQ ID NO: 13695 - DNA, 517 bp, Homo sapiens
ggcacgagtgaagaatggcgtgggttggttcctttcaaatgcacttgagcagcggtctccaaccacagggccacagagctggaggtgagcagcaggcgagtgaagggaaacttcatctgtatttctagcccctcccatcgcttgcatgaccacctgagctccatgtcctgtcagatcagcagcagcattagattctcacaggagcacaaactctgttgtgaagtgtgcatgcgagggatctaggttgtgtactccttatgagaatctaatgcctgatattctgttactgtctcccatcaccccagatggacagtctagttgcaggaaaacaagctcagagatcccactgagtctacgttatagtgagttgtagaatcatttcattatatattactatgtagtaataatagaaataaagtgcacaatatatgtaatgcacttgaatcatcctgaaattattccctcattcccagtctgtggaaaaattgtcttccacacattcactctgttttttggt

SEQ ID NO: 13696 - DNA, 300 bp, Homo sapiens
cggtgctggtgcggcgggggactgcggggccagcctcaggtagcagcagcagcagcagcagcagcagcagcagcagcagcagcagcagcaatgtttcacttcttcagaaagcctccggaatctaaaaagccctcagtaccagagacagaagcagatggattcgtccttttagaagcatctcagaggctctccagtgacgtgctgttaaaagtgctgaccctgggtcagaccctttgggttggcttcgtggctccacgacttactctctacccttggcagtggcgtgatctcggctcactg

SEQ ID NO: 13697 - DNA, 432 bp, Homo sapiens
ggcacgaggaatgggtaggaacaagcattagcctggtctgggttcctccagctcttaggacaagttggaacacatttgctgttctgatgattcatctttctgatcacagggatagcataactcagctttgaagaaaggcatctgcagagatcatggcagttccattttgcgttctgagtttgctcctttaggtaagggaactagaatgcagatacagttagaatcagtctctctctctctgtttgtctgtctgtctgtcactctctctctccttattgcactgatggccgggcgcggtggttcacacctgtaatcccagcactttgggaggctgaggcatgtggatcacgaggtcacgagatcgagaccatcctggccaacatggtgaaaccccgtttctactaaaagtacaaaaattagccggcgtggtgg

SEQ ID NO: 13698 - DNA, 628 bp, Homo sapiens
gcctcatcttctctgggaaccagggcagggggcaccagcgccctctgcccccctcagagggtctctcccctcgacccccaaattcccccagcatctcaatcccttgcatggggagcaaggcctcgagcccccatggtttgggctccccgctggtggcttctccaagactggagaagcggctgggaggcctggccccacagcggggcagcaggatctctgtgctgtcagccagcccagtgtctgatgtcagctatatgtttggaagcagccagtccctcctgcactccagcaactccagccatcagtcatcttccagatccttggaaagtccagccaactcttcctccagcctccacagccttggctcagtgtccctgtgtacaagacccagtgacttccaggctcccagaaaccccaccctaaccatgggccaacccagaacaccccactctccaccactggccaaagaacatgccagcagctgccccccatccatcaccaactccatggtggacatacccattgtgctgatcaacggctgcccagaaccagggtcttctccaccccagcggaccccaggacaccagaactccgttcaacctggagctgcttctcccagcaacccctg

SEQ ID NO: 13699 - DNA, 222 bp, Homo sapiens
gtagatactatgtttgtaagtctatagctaagcaacttaagccaaaaaggtctttcaactgaagctttaatcaacttattttggagatgttctcttcccttatctcatgcgtcatccctaaaataataagatacatgggatcaaatagcccttgccttttcaacacaaatcagttggaaaattatggtttgagtcctgttgctgccatggcttctgtttctc

SEQ ID NO: 13700 - DNA, 405 bp, Homo sapiens
tgagcccagccttcagggccatggatgtggagccccgcgccaaaggcgtccttctggagccctttgtccaccaggtcggggggcactcatgcgtgctccgcttcaatgagacaaccctgtgcaagcccctggtcccaagggaacatcagttctacgagaccctccctgctgagatgcgcaaattcactccccagtacaaaggacaaagccaaaggccccttgttagctggccatccctgccccattttttcccctggtcctttcccctgtggccacagggaagtgtggcctgaataccccaccccggctcctctgcacccagagctgggggccacctcagaagtgtcatctctctctgagcacgcattcccctgcagcagtcgaggactgagcagattgagtgat

SEQ ID NO: 13701 - DNA, 611 bp, Homo sapiens
tactgtgaatggagagcttcagctaagaggaggctctgtcccttttcagagccaaaggaaataatacaacaaaaaggaggcttctttggagacctaagtctattggatgtaaacaagacgttgtatttagggatgttctgtgtttctttcttttttgaagttgtcatcaattgctttactaagatttttaaatagtgaaaacctcctgtttagactttggtggaagatgaatcaaggaagcagggccctgtcttatgggtcacgtgtctttggtgagtgagaagacctaaactcctggccatcatctcttatccaatacttagcagttggggattaaaccatccttgccttcagttctctccaatattaccaggcccaactcagtcttcagtgattttaaacagcattgacatcatctgtaaaaccatcatctgtaaaaccatctatgacatgagttttgagaaacaataatggggaaaatatttgggaccaagctgaagcactaatcccactaagttaaagacttctttccagtccaaggcaggcctgaatcaactgtctttaaataaaattttaagtgatgctgtattatatataggaaaaaatgctta

SEQ ID NO: 13702 - DNA, 128 bp, Homo sapiens
cgggtcccagcctcgttttccagccctcactcaaaatggagtcgctctggttcgaacgcctctgacaagtgtgtacctacgtgtcagggagcctgctcacatgaccgtgtggagaaagttctttccct

SEQ ID NO: 13703 - DNA, 412 bp, Homo sapiens
agataagccagtttaggtgaaatgaaattctgacctaaatataaaacaaaagtttcatttctgcctctttgctagaaaggttccttattcaaaataagaactcctaagacatttaaaagaagatctgttcctcggctgggcgcggtggctcacgcctgaaccccagtactttgggaggccgaggcgggcggatcacgaggtcaggagattgagaccatcctggctaacacggtgaaatcccgtctctactaaaaatacaaaaaattagccaggcgtggtgataggtgcctgtagtcccagctactcgggaggctaaggcaggggaatggcatgaacccaagaagcagagcttgcagtgagccgagattcaaccactgcactccagcctgggagacagagtaagactctgtct

SEQ ID NO: 13704 - DNA, 455 bp, Homo sapiens
gaaatgatttgacaccatcagttacgacaatatacattatgtagtttggcagcattgtattttcttgagcaaagactcagcgcagggcctggggttaactactccaagtggaagccaggctaatgttaggtcaagtctcttagcacagtgtttaggcaaatcctttttgcttcagggaagttcacagtccctcctcttgttcaagagaaagaatgaatttctttctcgtagaataaatatagttgttgcactccaaagtcctcaaaagaaaaaagttcagccattgtttatcatcattgtgcaattcaggaagagtcaaggtggtaaatgcaacaatcgaggaggtttggtgtactatcaatggtggcacaattgtctcataagaatagagatgcacttggtgggtcatgcctgtaatcccaacactttgggacgctgaggtgggtggatcacga

SEQ ID NO: 13705 - DNA, 624 bp, Homo sapiens
ggcacgagcggcggcctcgcctcgcacccccagccagtccgtcgatccagctgccagcgcagccgccagcgccggcacatcccgctctgggctttaaacgtgacccctcgcctcgactcgccctgccctgtgaaaatgttggtgcttcttgctttcatcatcgccttccacatcacctctgcagccttgctgttcattgccaccgtcgacaatgcctggtgggtaggagatgagttttttgcagatgtctggagaatatgtaccaacaacacgaattgcacagtcatcaatgacagctttcaagagtactccacgctgcaggcggtccaggccaccatgatcctctccaccattctctgctgcatcgccttcttcatcttcgtgctccagctcttccgcctgaagcagggagagaggtttgtcctaacctccatcatccagctaatgtcatgtctgtgtgtcatgattgcggcctccatttatacagacaggcgtgaagacattcacgacaaaaacgcgaaattctatcccgtgaccagagaaggcagctacggctactcctacatcctggcgtgggtggccttcgcctgcaccttcatcagcggcatgatgtacctgatactg

SEQ ID NO: 13706 - DNA, 442 bp, Homo sapiens
ggcacgagaaaacatttcatcttgatttttattaaggtgatatgtatgttacttaacagctgtataatacacatttgcatgcattaggaagttttttttgggttttattcatcctgtagtgatgtatctgtgacctcaacgagtaggcacttctgtactgtactggtttcttaaagtttcttttatcccgcccccacccccaacctcagcctcaagtatgtaacaccatgcctggctaatttttgatttttttttttttttttttaaaaaaaattttctttttgcccccgggttgaataacaggggcggaatttgggttaattgaaaccttggcttttggggttaaagaaattttcctgcctaaccctccaaagaagtgggccctaaaagggcttcccccccccccaagttattttttgttttttgggaaaaaagggggttt

SEQ ID NO: 13707 - DNA, 561 bp, Homo sapiens
tagaaaatatgtatatttggatatactatgtgccaggcacgattccaagcccctgatacattctctacattttacagatgggggaaggaggtccagagatgttaaatacttgcccaaggtcacacagaaagtggaacactgggatttgaacaaggttttggttgggcatcttttcctatgggagctcagaaatatctgttgtctagccctttctcagcctcccaaccttctcggttccttacctatgtcacagctgactttgagctaaagtcatctcggggcagctaggtgcctatgtgagctggcgttcatttctcactgtttctccttccaaatacctccaggaagaaaagcaagtcctttttggtccaagacattaaaaaagccaggctcagcggctcatgcctgtaatcccaacacttggggaggctgaggcaggaggatcgcttgagcccgggagctggagaccagcctggacatgttaacatagcaagacccctctacagaaaatgttaaaaatgagctgggtgtggtggcgcacacctgtagtcccagttactc

SEQ ID NO: 13708 - DNA, 611 bp, Homo sapiens
ggcacgaggggccacgtcttgagcctgggcgccagcagcttcgtggaggaggagcaccagacctggtacttccttgtgaacaccctgtgtctagctctgagccaagaaacctacagaaactactttctgggagatgacggtgagcctccgtgtggcctctgtgtggaacaagggcatgacggggccacagcagcgtggcaggacgggcctggctgtgatgtcctggagcgagacaaaggccacggaagcccctctacctccgaagtgctcagaggccgcgagaagtggatggtgctggccagtccgtggctaatactggcctgctgccggctgctgcgctccctaaaccagacaggtgtgcagtgggctcaccggcctgacctcggccactggctcaccagctctgaccacaaagccgagctctctgtcctggctgccctctccctcctcgtagtttttgtgctggtgcagagggggtgctcccctgtgtccaaggctgccctggcgctggggctgctgggcgtctactgctaccgggcggccatcgggagtgtccggttcccgtggcggccggacagcaaggacatttccaagggtattattgaagctcg

SEQ ID NO: 13709 - DNA, 629 bp, Homo sapiens
ggcacgaggcaggactgggtcacatcattggacctataaaagaagatcacgtccggtattcccaaggactccaggtggaaaagttcagctggggaggtgattccatccagagtcatatctgttgtcaccccaataagtcgatcagcaaggctgacaggctgtgaggaaaccccggccttgtagcctgtcacctctggggggatgatgactgcctggcagacgtaggctgtgatagatttggagaaccctgactcaccctcaggaatccggaggtcagtgacattgtcggtgcacacagacattttcctaccctggtttccacagagactgagggtaaagtgatggaagtatttcaaccctttggaagtgaagcttggccctccagcaagagtgacggtgtttgccaaagcggagaagttgtagttgaaagtcctggttggagtgttgcgtgagaaggtgcaatcattgtagcacagagagtggatcttgttgttcttggtccctggaccacagggcacacaggcctggacaccataaggctggtgggctttcagaattgtgttaggggggcaggagtggcaggttcctgaatctcggtcaatatagtaaccagcaggacaagaggtgca

SEQ ID NO: 13710 - DNA, 436 bp, Homo sapiens
  misc_feature 357, 369, 372, 376, 382: n = A,T,C or G
tcgaattcggcacgaggcagcctcaacctcctaggctcaagggatcctcccacctcagccttctgagtagctgggaccacaggccctcaccaccatgcccagataatttttgcactttttgtataggtggggtttcgccgtgatttcccaggctggtctcgaactcctgggctcaagcaatacacctgcctcagcctcccaaaattctgagattacaggtgtgagccgctgcacctggccaaagtgttcttatttttgctttttcaacgccacatctacctggagcatcctctttctgataagtctcatggacttcctatggcatgcaagagaggccacccctatgctgagctgctngggaagagccangangacngatccngctgtaccttagggctgagaagtgtgaaagaccactcagaccctgctttgctgg

SEQ ID NO: 13711 - DNA, 611 bp, Homo sapiens
ccgggcgagtacttcagcgttgggagccaggtgtcgtgccggacgtgccaggagcagcggctgcagggcgaggtggtagcctttgactaccaatccaaaatgctggctttaaaatgtccctcttccagtggaaagcccaaccatgcagacatcttgctcataaacttacagtatgtttcagaagtggaaataattaatgaccgaacagaaacccctcctcccctagcttcactcaatgttagtaagcttgccagcaaagcacggacagagaaggaggagaagctgagccaggcctatgcaatcagtgctggtgtctctctagagggccagcagctcttccagaccattcacaagaccattaaagactgtaaatggcaagaaaaaaacatcgtagtcatggaagaagttgttattacacccccatatcaagtggaaaactgtaaaggcaaagaggggagtgcactgagccatgtacgcaaaatagttgaaaaacattttagagacgtggaaagccaaaagatactgcaacgttcacaagcccagcaaccacagaaggaggctgccctgtcatcctgagtccgtacacatggaggactcttccagcatccagc

SEQ ID NO: 13712 - DNA, 623 bp, Homo sapiens
ggcacgagatttctgccgagtcgagctggacacccggagatcagggaggcagcagttgcagtccatcaaggggaccaaactcaccatcacccaggctgtcacaaccaccaccacctggaggcccagcagcacaaccaccatagccggcctcagggtcacagaaagcaaagggcactcagaatcatggcacctaagtctggacactgccatcagggttgcattggctgtcgctgtgctcaaaactgtcattttgggactgctgtgcctcctcctcctgtggtggaggagaaggaaaggtagcagggcgccaagcagtgacttctgaccaacagagtgtggggagaagggatgtgtattagccccggaggacgtgatgtgagacccgcttgtgagtcctccacactcgttccccattggcaagatacatggagagcaccctgaggacctttaaaaggcaaagccgcaaggcagaaggaggctgggtccctgaatcaccgactggaggagagttacctacaagagccttcatccaggagcatccacactgcaatgatataggaatgaggtctgaactccactgaattaaaccactggcatttgggggctgtttattatagcagtgc

SEQ ID NO: 13713 - DNA, 503 bp, Homo sapiens
aaaatcagaaagagtttgaaagggtacgagtgatttacaagtatgccctggacagaatttcaaaacaagatgcccaagaactctttaaaaattataccatctttgagaagaagtttggtgataggcggggtattgaagatatcattgtgagcaaacggagattccagtacgaagaagaagtgaaggcgaatccacacaattatgatgcatggtttgattacttgcgcttggtagaaagtgacgcagaagctgaagccgtgagagaagtctatgaaagggccattgccaatgtcccacccattcaggagaagaggcactggaagcgctacatttatctttggatcaactatgcactctatgaagaattggaggcaaaggatcctgagaggacaagacaggtgtatcaagcctctttggaactaattcctcacaaaaagttcacatttgccaaaatgtggatactgtatgcacagtttgaaatacgacagaagaatctgtcatta

SEQ ID NO: 13714 - DNA, 376 bp, Homo sapiens
  misc_feature 225, 232, 247, 253, 257, 263, 270, 281, 285, 290, 296, 308,313, 325, 342, 363: n = A,T,C or G
aatttttgtatttttagtagagacggggtttcaccatgttggccaggttggtctctaactcctgaccttgtgatccgcccaccttggcctcccaaagtgctgggattacaagcatgagccactgtgcccagctgagtctacctttttttttttaggagttgtaaataaaacaagaaaataacactattagttattttattactaactatacaactactttaacanaacactnttttttcccaggggnggggtngggngtaaangggcctnttgtaaaaatnactnttggncatggnaatgggggattnataanaattttgccatnttagggctgctcacagnatttggggccaaaccctacgngaatatatgtggg

SEQ ID NO: 13715 - DNA, 486 bp, Homo sapiens
ggcacgagatgcagtgtaactggcaggaggggagtgagaactacttgggtagatgatcaggagatactctgcaagaggaaacatacagaaggagcctgacatgagaaaactggggcagcagttttccaggaagagggaccagcacaggtccaagttgaaactcagaatggaattttaggaaattatattcttcatgatggttagatcctgtgggctatcatcactgcagttcaacaatgtggtgcctagtaggaagagttctcccaggaaccctccacgtgtgctatgggatttctgagaaaaccagttctgagttctaggcagtggactcacagttgaacttggagggaaccaagaattgcttccatcatagccttactaagaaatgaccatggcatggcctgagtgcttcggcatggaggaccagaaggggaagccctaatttgccagttgcagactcttgagccttgtgactctaatgacgac

SEQ ID NO: 13716 - DNA, 536 bp, Homo sapiens
  misc_feature 472: n = A,T,C or G
ggcacgaggggattacaggcgtgagccaccgcgcccagcctcatatcccccatttcaaacacgctgtaaacaatgctcaattactttcctcttaagttgaaaccaccaattactggggaaaggggcagttagattttattggttgactttgtgtttttactaatccttgttgaaaagtagaggaattggtttagttgagaaaacaaaatactaaaaaatctgccactagactttttaagtcaagagtttgtataaaatgaaacatatctactatctaatctataaaatttagaatctttttaattctaaagttaacttaagtgtgatttttagtgctgttgctgaggccagtgttgcttaaagcaggaacttctacagtaattgacaaaacttgagtttttctgctctcatttatccatccttcagacccctcagatgtcatctatttcctgaaatctgacttctccagttntagtaattcttacaatttttcaggatttagatagtactgtacagtttactgctatgtatatgtc

SEQ ID NO: 13717 - DNA, 399 bp, Homo sapiens
ggcacgagggaagatgagctcgccaagaagcgggcggccttcctcctgaagcagcagcgcaaggccgaggaggcccgcgtgcgcaagcagcagctggaagcggaggtggagctcaagcgtgacgaagcccggcgcaaagctgaggaagaccgggtgcggaaggaggaggagaaggcgcggcgcgagctcatcaagcaggagtacctgcggaggaagcagcagcagatcctagaggagcaggggctcggcaagcccaagtcaaagccgaagaagccgcggccgaagtcggtgcaccgggaagagtcgtgcagcgactccggcaccaagtgctcctccacccctgataacttgagccggactcagtcaggctccagcctgtccttggcctctgcggcgaca

SEQ ID NO: 13718 - DNA, 416 bp, Homo sapiens
ggcacgaggcctcatccatggatcagggaggcacgctagggagtaacccagttctgcccagcaggctacacccaactaactctggcccctgtctgtgctatttaacatttcattaatacaggagctcctgggaagaagcttggctcagtatccttggcagatcacccctcaaagtctccctcaggtatattctaagtgaggacggatcccatatatacctcacttaggctttactctgctctgcaagcacaggcaagaccagctacatctttgcacgccacccctggttcttagtaggccaagaacctcagaaactggcagggcactaagagctgtatcttagaaactgtgttgaagttacatttattcagctttgatctgggtgggccctgtacctggcactgctaacaagtgtt

SEQ ID NO: 13719 - DNA, 560 bp, Homo sapiens
tagttatgtttcataatgtgttttcttaaaaaggtttctcagaggcaagcgtggtggcatacgcctgtagtttcagctactcaagaggctgaggtgggaggatcatttgattccaggagttttagtccagcttagacagcggagtgagacccctgtctcctatacagagagagaaagaaagagttaaaaaaaagtttctaaaatctttttggtaactctatacccttagagttttgctgagacaaattaaataatacatatttttagctgggcttggtggtgcatgcctgtagtcccagctacttggaaggctgaggtgggaggatcaattgaacctgggaggtcaaggctgcagtgaactgtgatgacatcactgcactcagcctgggcaacagagtgagaccctgtctcaaaaagataaaaaaattagggtcaggtgtggtggctcacgcctgtaatcccagcactttgggaggctgaggttggtggattaactgagataaagatttcgagaccagcccagccaatatggcaaaaccccatctctactaaaaatacac

SEQ ID NO: 13720 - DNA, 405 bp, Homo sapiens
cacaaaccgtcctttcttacgcaaactagctgggaataaacaggccccctgtgggtcttagaactaaagcaaatatgaacctcaaagaacaaaggaaaatcattactggtggcaggaatatgagagtgcttccacaatactatttcacaagtcttttctacatgggcttcagtcacaaaggtggtttgacattcactgagcagcatgggaacaattctagaacacttattctatccctgagctatttctgggataaaaatattgttaaaatacggctgggcaccgtggctcatgcctgtaatcccagcactttgagaggctgaggcaggcagatcacctgaggtcaggagcttgagaccagcctggccaacatggtgaaaccccatctctactaaaaatacaaaa

SEQ ID NO: 13721 - DNA, 348 bp, Homo sapiens
tcatccctctctacgataaggttgcagaaatgggaagagctacccgtggttgcttttgattacccttaggaagtgagacagtgtttttgaaaatatgtatttcccccatttctccctctccttccctgacacttctctgggctgcacagcagaaacgttggtaaaagggcagtttggtttcaacacagcagacctgatatgggatcccttagccactttagtcaaacagccctgacagagtctataattgagttcaggccccccaccttgcctaataactgcaaatcgcatgttcagccagcagcctcctaagcccaccttcctcccccattagagaacacccatcct

SEQ ID NO: 13722 - DNA, 625 bp, Homo sapiens
cgggcgcccctcccccagcctcgctgccgccttgcagtttgatctcagactgctgtgctagcaatcagcgagactccgtgggcgtaggaccctccgagccaggtgtgggatataatctcgtggtgcgccgttttttaagcccgtcggaaaagcgcagtattcgggtggggtgacctgattttccaggtgccctcagtcacccctttctttgactcggaaagggaactccctgaccccttgcgcttcccaagtgaggcaatgcctcgccctgcttcggctcgcacacggtgtgcgcacccactgacctgcgcccactgtctggcactccctagtgagatgaactgggtacctcagatggaaatgcagaaatcacccgtcttctgcgtcgctcacgctgggagctgtagaccggagctgttcctattcggccatcttggctcctcctgcttctttccttgatatgatgttcaaaccaggaaaatgtgcaaatatcaaggttacctgggtctgctggtcacttctagtttttggactcttgaagatggaaactgttcttagaagaggcctgaagagaaacatgactgactagatccaatcctctggcattacatcaatgcagaaagag

SEQ ID NO: 13723 - DNA, 551 bp, Homo sapiens
tggtacgtacctgtagtcccagctactcaggaggctgaggtgggagaattgcttgagcctaagaggtcgaggctgcagtgaggtgtggtcgcagcctgggtaacagagtgagatcctgtttgaaaaaaaaagagcaaagggcaaaaaactaagagttgcatatgaaagaaataccaatgaataccacggaaaagatgttcaattccattcataagatgagatatacacatttggtttataaaaagatagtggtcttcacctaaaaaaaaatagcaaaagttaaaagtctcagtatatactatatttgttgaagctgcttcagggaaagaatccagccttgatggtagaagtataaattgataccacctcttcatttgtaatacagctattaaagtaagtgcctataccctttgaacaatccaatttttagaaattcatcctacaggacaaagatataagtaccgggatcttcatttatggtataattaatgacaaaagactaaaaatgaccttatcgtcaggaagagaggacagcttgaataaattacgtg

SEQ ID NO: 13724 - DNA, 544 bp, Homo sapiens
ttaaagattaagaatactcaatgcgccaagaagtgctatataccagaaaagtttgtatcaattaatgtatctaaattaagttaaagtttctttcaatttaatgtgcttgcagatgtaaaattgcatgtttaagttttgcagttatgtactaaatctggtgctacacttctaatgtctaaaggttttattcaatttcaatttatttgttttatagtttgccagaatgtgcttatgaaaggcactctcagtcataaaaataaaattataagcagactggcacataactatttttttaaataataaactttctgattttagagacttgtattcttttataggtcctggttctctttcacgctctgacctataagaacccatacagcatgcattgctgtgtatggaaaagcagtaaagggaagtacagccaccttttaggtcccatgaatagcaaaatctctttgactaatctcttgtttcagggtatgtccactccttgtttaaagaatgtaactggctgggcttggtggctcactcctgtaatccc

SEQ ID NO: 13725 - DNA, 553 bp, Homo sapiens
ctcatgtaaggaatgaaccaatcttaaaagaagaaaacataattctacaaaacttttcaaaatctagactttaaaactcttttatgtcatcgtggtgctatcactattctaatagtttccttgagctaaaaatctggacagaattcatattttcttggaagaatcattttacttgtaattcaactgtctacctacaaatttagatttgccctgttgctcttcttcctttaattaacaaaattgagtagctttttatgttggagatatgttgcataccaatggggaaaaaataaaataattatatctccggccgggcctggtggctcctgcctgtaatcccagcacattgagaggccgaggcgggtggatcatgaggtcaggagaccatcctggctaacacggtgaaaccttgtctctactaaaaatacaaaaaattagccaggcatggtggcgggtgcctgtagtcccagctactctggaggctgaggcaggagaatggcgtgaaccctggaggtagagcttgcagtgagcagagaccgtgccactgcacact

SEQ ID NO: 13726 - DNA, 591 bp, Homo sapiens; identical to SEQ ID NO: 8870

SEQ ID NO: 13727 - DNA, 372 bp, Homo sapiens
gcccaccaccatgcccagctaattttttgtattattagtagagacagggtttcactgtgttagccaggatggtctcaatctcctgacctcgtgatccgcctgcctcggcctcccaaagtgctgggattacaggtgtgagccaccgtcccgacttatttcagccatttttaatttgctaatagtcacgaaagatttttcctagtaaaaattctgaactcaacagcaaacaagttttcatgtttaaaacaatcaatcctcaaaatcctctaatcttcctaaatattctatgtctgataggaataaaatgatgagataacgcatatattttgctatagaattttgcacagaatttaaacagaaatgtcatttatc

SEQ ID NO: 13728 - DNA, 638 bp, Homo sapiens
ggcacgaggccagagtcgccctggttttctatggcgtcttccaggaccggaccctgcacgtgaggtatacggacatcgactaccaggtcttcaccgacgccgcgcgcttcgtcacggaggggcgctcgccttacctgagagccacgtaccgttacaccccgctgctgggttggctcctcactcccaacatctacctcagcgagctctttggaaagtttctcttcatcagctgcgacctcctcaccgctttcctcttataccgcctgctgctgctgaaggggctggggcgccgccaggcttgtggctactgtgtcttttggcttcttaaccccctgcctatggcagtatccagccgcggtaatgcggactctattgtcgcctccctggtcctgatggtcctctacttgataaagaaaagactcgtcgcgtgtgcagctgtattctatggtttcgcggtgcatatgaagatatatccagtgacttacatccttcccataaccctccacctgcttccagatcgcgacaatgacaaaagcctccgtcaattccggtacactttccaggcttgtttgtacgagctcctgaaaggctgtgtaatcgggctgtgctgctgtttgtagcagttgctggactcacgt

SEQ ID NO: 13729 - DNA, 336 bp, Homo sapiens
ggcacgagctgtggtcctgtggtcccagctactcaggaagctgaggcagttgaggctgcagtgagccacgttctggccactacactccagcctgggcatcaaagtgacaagaccaaaaaaaaaaaaaaatgggggttggaaggggggcaaaaaaaaatccggaaaaggggggaaaggaaatcccttagggacaaatttttactcaaattggtttcccaaactttgggaaaagggccaaaaccgaaggtttttttgaatttatttaaccaaaaccccacccctaattaagggcaggggcatgggaaaaaaaaaacccacttggaaaaattttaaagg

SEQ ID NO: 13730 - DNA, 403 bp, Homo sapiens
ggcacgaggagagagagagagagagagatagagagagagagagagagagagagagagagagagagagagagagagagagagagagagagagagagagtgtgtgtgtgtgagagagagagagagagtttctctctctctgtggtatatatatacacccactctctcttctttctctctagacacacaaagcggctctctcgcgggttttacccacgctctctcccccccagaatatactgcgcgctttcccctcctctgtatatccgcgcgcgcgcgcacgtgggatatattctctctctctctctgcgcgcgcacacacatatcccgcgtggttttctctctctctctctcttcccgtgagagagagagtgtgtctctattttctctctcttgcgcacgttcc

SEQ ID NO: 13731 - DNA, 395 bp, Homo sapiens
ggcacgagaatggatctgaatttgacaaatagcatgccacactaatactacagtcaacaacagcccagagaacaattactatgtcagctggaggctatattatgattctaaattcttaaaggtttttttccctccataaatcaaaaattaccttatgtaaaccaaaaattagttggtatttatggtcatgatcttaattctcaagtttagcttaatcttgtatttcattgtttgtcttctaatatgacagcttaaattcagatttttaagtgactcagcaaaataggaggagtgtcccaatttattagtgttgtacatattgaagaaaacctttttgttccttcagatttagaaagaaacagtttaaccatttatttcttggtattctgctgctg

SEQ ID NO: 13732 - DNA, 523 bp, Homo sapiens
actggcaaccagagaatgttaaccaggctttcaccagacccccacctccctatcctgggaacattaggtctcctgttgcccctcctttaggacctagatatgctgttttcccaaaagatcagcgtggaccctatcctcctgatgttgctagtatggggatgagacctcatggatttagatttggatttccaggaggtagtcatggtaccatgccgagtcaagagcgcttccttgtgcctcctcagcaaatacagggatctggagtttctccacagctaagaagatcagtatctgtagatatgcctaggcctttaaataactcacaaatgaataatccagttggacttcctcagcatttttcaccacagagcttgccagttcagcagcacaacatactgggccaagcatatattgaactgagacatagggctcctgacggaaggcaacggctgcctttcagtgctccacctggcagcgttgtagaggcatcttctaatctgagacatggaaacttcattccccg

SEQ ID NO: 13733 - DNA, 567 bp, Homo sapiens
aagtgccagactcccgccaggcagaaactgaagctgaagtgaaaaagaagaagaacaagaagaagaacaaaaaggtgaatggtctgcctcctgaaatagctgctgttcctgagctggcaaaatactgggcccagaggtacaggctcttctcccgttttgatgatgggattaagttggacagagagggctggttttcagttacacccgagaagattgctgaacacattgctggccgtgttagtcagtccttcaagtgtgacgttgtagtagacgcattctgtggagttggaggaaataccattcagtttgccttaacaggaatgagagtgattgccattgatatcgatcctgttaagattgcccttgctcgcaataatgcagaagtttatgggatagcagataagatagagttcatctgtggagatttcttgctgctggcttcttttttaaaggctgatgttgtgttcctcagcccaccttggggagggccagactatgccactgcagagacctttgacattagaacaatgatgtctcctgatggctttgaaattttcagactttcta

SEQ ID NO: 13734 - DNA, 417 bp, Homo sapiens
  misc_feature 1, 315, 318, 319, 320, 321, 322, 323, 324, 325, 328, 329,331, 332, 333, 338, 339, 340, 341, 345, 361, 362, 365, 373,378: n = A,T,C or G
nccggcacgagcgggaaccctgctcagtcctgccgggcactgcatgcagggaccgtccgcctgacccagagacctggggctgcctcaccctctctccagacccacagccagctttgtttcttgaatgtggaagatgtttcttattccctgaagaaagggggcctgccacacacagcctgggaggcgcctcatccagaaactgggacttggctagcccggcctgggccctagggacttctcactggtcatgcttctgaagctgctcacctggccgagggaggtcccggcagtgtcccagggtggaaggtggggggnggnnnnnnnntgnntnnnttttnnnntgtntttttgtggtgtttgnnggnttgttttnttgtnttttgttaggcgaggggtggttttgctttgttttgggtg

SEQ ID NO: 13735 - DNA, 563 bp, Homo sapiens
actaagcaaaattagaaatgtcttggtttatatatttcttcccatgctttctgtctctacaaccagaatataagcttcagaacaagagtattcaaatctggtgtgtttatccccagactcacaacactgggtccagagcaggtcctcagtagatgtttataaatatcaggatgtattacatatattaactttttatgagtagttattatttattatattccacttagatatggaattattacttcaggtggtagctgacttgtactggaaaagtgactgagcccaactctaatgctaatgttaattggatttatatgaagtttctttggttttaattgcactttgaatgaattcaagaatttcactagctataacttctatctatggtaagaagcgttgtccaagccacagaacctcaagattacaacagagatttaaattaaaactcttctaattgttattattgtaattattataattcaccaactggacaattggaacaataaactcttggaatttaaattaagtatggaatggggatggatgtttggggtgctttatag

SEQ ID NO: 13736 - DNA, 569 bp, Homo sapiens
tgcacccagcccatagtgttttgaagctaagatgcgttcagccctcccagaatcttagggattatatgaatcctctatttaaattctgttcccagccctgagggttgatcacagaaacagtagcttagagaaacaacatacctgtagtgtcacatgttgaaagattcctattcagagatgataaccattgttcattctttgcctctactgggaaaagtgtgcttttgcttcccataagaactcaaaatttaggcttgttttaaggaaggaggctatcattgaccaaattgtagatagacagccaggtgcggtggcttatgcctataatcccagcactttgggaggcagaggtggacagatcacttgaggccaggagtccaagaccagcctggccaacatggtgaaaccccatctctactaaaaatacaaaaattagccaggcatgatggctcatgcctgtaatctcagctacttgggaagctgagggatgagaaatgcttgaacctgggaggcagaggttgcagtaaactgagattgcactactgcactccagcctgggcaacagaaca

SEQ ID NO: 13737 - DNA, 509 bp, Homo sapiens
aatgcagctaacagattatctgagagactggccttgtggtaaatcatactgagagcctgctaggagatataggaagaattggaaatgggtacacacaaaactaagcaaattaacaatcagggcaattattaacttcaggagaaataaaaaaaaagtatactacaatgttcagttattaatatttgcataacaatgtaaatactgaatattggtatattgtaaatggtaatatagctatattggggcttataactaatttatctatctataataaagagaagtcaatggatatcttgaaattatgaatcaaaaggatcaatatttatttagaaaaatatgctgggcacagtggctcaagcctgtaatcccagcactttgggaggctgagacgggtgaatcacaaggtcaggagttcgagatcagcctggccaacatagtgaaaccccgtctctactaaaatataaaaattagtcgggtgtggtggcatgcgcgtgtagtcccagctactc

SEQ ID NO: 13738 - DNA, 273 bp, Homo sapiens
aggcccctggctcaggcagagggagatggttagactcttgcagggctaaaactctaatttggaattgaatattgtggatatcttagttaaaggccatgcttacagcttagaaatgaagccttaagctgcatcatcatatcgccctgtgtggtctgcaggggagcaggacaagccaagcagaaaaagcgagtgatgatccctgtgcctgcaggagtcgaggatggccagaccgtgaggatgcctgtgggaaaaagggaaattttcattacgttc

SEQ ID NO: 13739 - DNA, 424 bp, Homo sapiens
attccacattttcaagaaataaggaggcaaaaactttcatatatgaattggaattatttgttttcttattaggccgagatgcgccgcgtgcggctgctggagatggcggacgcgatggatatgttctgccaagggttggtttgcgcattcacagttctccgcaagaattgattggctccaattcttggagtggtgaagaaagaaaaaagttgaactagatttggtctgatgcagttacagatttacaaactgtgcccccaccctcctgcagacaccttccactcctcattcttgagggattagggatggaggtcatgcttctgtatcgacttcatgctgaccagggtcactgagtcccctaaagtgagaggaatgaaactcttgggcttctgagttcaaatgagttctggggtcacctggagta

SEQ ID NO: 13740 - DNA, 526 bp, Homo sapiens
ggcacgaggtctagtataatcttgatgctcaaaccagataaggacaatacaagaaaggaagagtataggctaattctacccaataactaaatgaagtattagcaaaccagattcatcaataatcttttaaaaatcaagaattaattggatttaggaatataacactgtgtataacaagtttaagagaaatatatgagaatgataagactgcaattgaaagtagaggctttctctggagggaaaggtgaggaggatgtgatttggaagaacagcatggggaggcatcagttgtattgtaatgtttattttttaagctgaatgataggtacgtagatgttcattgtgttctttatgcctttttgtatatcttaaatatatggtagtgccatgattagcaggcttaatagccttgtgagtttaaatgtcactttcaaatgctgtatttttggtggagttgcttaaacacattccccttggaatctatacaaccagttaaaaaaatcatgtataaaccaccatgaaatat

SEQ ID NO: 13741 - DNA, 603 bp, Homo sapiens
tggctggtattataggtgcacaccaccacacccaactagttttttgtgtttttagtagagatggggtttcatgatgttggccaagctggtctcgagctcctgaccccaggtgatccacccacctcggcctcccagggtgctggaattataggcgtgagccactgcgcacggcctggggaggttttatttcttgacaaaggtatttgatactcgtgcagaccctggagggtctcactggagagacaacatttaggctgagatctgattaacaggaggcagctgcagtgcagaggtcaaaagggagggtgttccaggcagagaaaacagcctgtgcaaaggccctgaggcagaaacaaactctacttgaggtcagcctggttagaaaacccaactcaaaatagaaagtattacatgataaggtctgagatcagaacccaagtctgcacttcctagtcacgttctccctgtagtgctaagcccagagacctgagctgttaacctagaacagtgtgcttcctaagccttaatgtgcatacccatcgcctggagctcgccttaagatgtaggctctgcctgaagcccaagttcatttagtatgtcatg

SEQ ID NO: 13742 - DNA, 542 bp, Homo sapiens
ccatctggggcagcaccacgtggatctctccctcgtcaccttcaactggttcctcgtggtctttgcggacagtctcattagcaacatcctccttcgggtctgggatgccttcctgtacgaggggacgaaggtggtgtttcgctatgccttggccattttcaagtacaacgagaaggagatcttgaggctacagaatggcctggaaatctaccagtacctgcgcttcttcaccaagaccatctccaacagccggaagctgatgaacatcgccttcaatgacatgaaccccttccgcatgaaacagctgcggcagctgcgcatggtccaccgggagcggctggaggctgagctgcgggagctggagcagcttaaggcagagtacctggagaggcgggcatcccggcgcagagctgtgtccgagggctgtgccagcgaggacgaggtggagggggaagcctgacttggccacctcccctccccacagccttcctcacccttggctggcagacccactggaggtcaggcacggaccagtggcccag

SEQ ID NO: 13743 - DNA, 613 bp, Homo sapiens
ggcagagaaactagggagcccggggacctctccacatattctttgctctgtacacttaatcaagataagaaataaagacagcaagactgcaaaaagtctattatgtagacttgcaaaaagtctacataataatataaattcaagccaagtagaagtgattttgcaagtctgtgtatgattaattggctagtgaaatatatggataaaattagttgtaggaattaaagcatctgaagtgatctcttgaggctctggtggcaaagcagaaaggggaatttgaatttgaactaggtttaaaagtgtgagtagtagccctttcttttggcaggggaggtgatcctacccattctccttagagcctgtgcaattggtctcagtgtttctcaacatctaagaatgaagctgcattcttaatgctttagtagctgtgcttcaaaacggcaagtttccttttgagagtgattttctctttgttctagcttgtttcactaggcggataagcgtgggcagtaaactgggaggtgtccctttatcagcacctctcagcttcacccaccctgctgcttgccctgggcagtagcctggtcacatctttgaaaacctctgtttagtc

SEQ ID NO: 13744 - DNA, 421 bp, Homo sapiens
atccacccacctcagcctccaaaagtgctaggattacaggcatgagccaccgcgcctggcctgtctaatcttttatttaatgcatctaggctcctcctttcttccttcatggtttcctttttcctacttccctatctcgttttctttccttcttttcatttacagagaaatggtgttagaaatgaatgagaggagtgagcaaagaaagatgagggaaaaatagatgtgttaaggagtatacgcataaagaaaagaggccaggaggaaaagctgttcaccccgactcccatcctaatcttgcgtagtctttcgtttcctgagaatagttaggtcagaagttacagtagaaactttcatggaatacacaaaagggaattaagtaaggaaacttgtgaccgatgctatgggaaaggacatgttt

SEQ ID NO: 13745 - DNA, 450 bp, Homo sapiens
gtatcttaacagtctggcagggggtgaagtctcctattgataagcagggcctacatctgctactctactgcagaggtgggtatctaacaactgcttccaaagagtcagtttctcccagggcttgggaactcctttgggagctacactaacttctaaaacatcagggaaccactgaacaaattatcatttcagtgcactcagtgatatcctaacggcctggaaacacagtcctaacctacctctagggtcttagagaacagttcacacagaaggaaatttgctcaataataataacaatgtcaagatactaacatatcaaatagtcttagagggaggctcttgagctacacttctccaggtgaattagcatcttcccttaactttccttcccagcaatgaaaaatgctcaacatgcagtaagaagagttttttgtttgtttttttgctttt

SEQ ID NO: 13746 - DNA, 651 bp, Homo sapiens
cctgtgtgttacctgattgtaacaaccctatgcccatttcatagactgggaaacgaggtactgagaagtgaaatagctcaaagtgatttcactggaaagagacacagcatgggaacctagttgtgacgcactggagcgccaggtcttaatcactgagcaagattgctgtccaaaaaataaaaccagttccactttgcagggaacccagggtttaaactagtaattcttagatattttagggaggagacgtgtataaaagtgtgtatttggggacagggctggtgaacaatcataaaacagaacaggcatgcatctgtccacaagaacagacttcacgagtctacagatgctgttcccagggaaatacacatcacatgtaatattgcatacattttcagaggatttaaaggtacacttggaatgggccaagcacagtggctcgtgcctgtaatcctaacactttgggaggatcgcttgagcccagaagtttaagaccagcctggccaacatggtgagaccccatctttatttaaaaaataaaaattaaaaaaaagagccgggcatagtagcctgtggtagttccagctaccccacaggctgaaacaggaagatagcttgagcccaggagatagaggtgacaatgagctacag

SEQ ID NO: 13747 - DNA, 646 bp, Homo sapiens
tttctactgtgcttaccctaatggattttttatatagtctcactttctaattcataatctgatctctagtttcatcagagcaccttagtttttaagtaaaggctcttcttctattaaccacttctaaaatgacaaatcgggcttattctatgcagttcaaaaaacagaacaaggctaagaggtgaagttatagaaaagacattttcactcacagaaggaaaaatttggacacagccagagtagttaaaacacaaaacaagaaaccagaatggacaaggttgaaaagtagtaaactttaagtcatttagtagcacttaagcagatgacaactatacctattcatttgttatattttggaggggcatcttatagtcttgattaagtgatttctgtacctctgaaatacagtagtctaggccaggcatggtggctcatgcctacaatcccagaactttgggagactaagcgggcagatcacctgaggtcaggagttcaagaccagcctggccaacatggtaaaaccctgtctctactaaaaatacaaaagttagctaggcctggtggcatgcgcctgtaatcccagctacttgggaggctgagaggaaaatcacttgaacccgggaggcggaggttgcaatgagctgag

SEQ ID NO: 13748 - DNA, 562 bp, Homo sapiens
ctggaatacacaatcgtttatgctagtgatctaggagcagagtgagaagaagattgagagtcttaatactcaaaatgatactttcatttaatctcaatatttagtatcaatacaggacctctgccttcagctattcctgttgtctgcaagtctagaaacttttccctttcctaataacaagcttgtagtagagtgccagggttggggttgcttagctgctgcaagtcagggaggacaactaggagatctcacagctccttacgcagactggcgatgaatctttctcttttaggcctgccttcacccctgcttccagggatatcttgtgcttgccagttcttgtgcctgctgtaaatcagtttgcttctctgctttcctagttctgcagtgaaaattattattctttaattttctttccagagtctaaaggtactgctttttatttcatcttcttgattttttataggtgtattccctttaaaaattacatttttatcattttagtaggatgtttggactgagcagaaactaatgaatgtgtacaactagttatctttactta

SEQ ID NO: 13749 - DNA, 547 bp, Homo sapiens
ggcacgaggcgcgctgcacaatggcggctctgaagagttggctgtcgcgcagcgtaacttcattcttcaggtacagacagtgtttgtgtgttcctgttgtggctaactttaagaagcggtgtttctcagaattgataagaccatggcacaaaactgtgacgattggctttggagtaaccctgtgtgcggttcctattgcacagaaatcagagcctcattcccttagtagtgaagcattgatgaggagagcagtgtctttggtaacagatagcacctctacctttctctctcagaccacatatgcgttgattgaagctattactgaatatactaaggctgtttataccttaacttctctttaccgacaatatacaagtttacttgggaaaatgaattcagaggaggaagatgaagtgtggcaggtgatcataggagccagagctgagatgacttcaaaacaccaagagtacttgaagctggaaaccacttggatgactgcagttggtctttcagagatggcagcagaagctgcatatcaaactggcgc

SEQ ID NO: 13750 - DNA, 453 bp, Homo sapiens
ggcacgaggtcgagtccagggccaaggcttgtgttcaatcgtgtgaatggccggcgggccccctccacgtccccatccttcgaggggacccaggagacctacacagtggcccacgaggagaatgtccgctttgtgtccgaagcctggcagcaggtgcaacagcagctggatggtggcccagccggtgagggcgggccaaggcctgtgcagtacgtggagaggacccccaatccccggctgcagaacgagtggtgggcgcagcagttcctggcgagaatcaccagctgttcctagtggctgctgggagggggcgctgctacacggccgacctgtcgccaggagagaagcatggcgccctgcccacccactgcgcctggctgggtgccggccacacctgaagtgccagcatttggacttttgcacctttttttcccttggcccggctgtcccaac

SEQ ID NO: 13751 - DNA, 549 bp, Homo sapiens
ggcacgaggttcgcagagctgcggaagatgaatgccagaggacttggatctgagctaaaggacagtattccagttactgaactttcagcaagtggaccttttgaaagtcatgatcttcttcggaaaggtttttcttgtgtgaaaaatgaacttttgcctagtcatccccttgaattatcagaaaaaaatttccagctcaaccaagataaaatgaatttttccacactgagaaacattcagggtctatttgctccgctaaaattacagatggaattcaaggcagtgcagcaggttcagcgtcttccatttctttcaagctcaaatctttcactggatgttttgaggggtaatgatgagactattggatttgaggatattcttaatgatccatcacaaagcgaagtcatgggagagccacacttgatggtggaatataaacttggtttactgtaatagtgtgctgttcatggaaaaccgaggctgcatcttgtttatagtcatctttgtactgtaatttgatgtacacaacattaaaagtactgacacctg

SEQ ID NO: 13752 - DNA, 462 bp, Homo sapiens
ggcacgaggttcataccaacatttattaagacttatttttcagtggtcctcaatcacagaacaattaagcaaccatatacaatttaacatacctgaatatgagaaacacatttaaattcattgttggattaaacacatttcaaaatggaaagacaaatattttatttactgacctaaaacaacactacctatgaaattcatgcactattgctttcagattacttacaggattatatcaatttaacatttctttgtgagattaagcatttgaaatccatagtcagagaactattttaaatatgagccactaattaacaaaatatacatatagcttctacatttccatcaggttatgtattttctagagactacatgacccgctatgcatgaggctttttgaagtacttacatttataggattttgctgtattagaagttttcaaatgactttttttttttttt

SEQ ID NO: 13753 - DNA, 625 bp, Homo sapiens
atggcggaggtgcaggtcctggtgcttgatggtcgaggccatctcctgggccgcctggcggccatcgtggctaaacaggccggaaggtggtggtcgtacgctgtgaaggcatcaacatttctggcaatttctacagaaacaagtgtaagttaggacctgggaggagcactggagagggtctccctgtggggtgttgaggctctgaaagcaattgcagccgtgttgggagaggctacttggggtttctgagaaggcccttggaagtggggttttgggggtgctggtagactgggcaggcctcacactctcccctctccctagtgaagtacctggctttcctccgcaagcggatgaacaccaacccttcccgaggcccctaccacttccgggcccccagccgcatcttctggcggaccgtgcgaggtatgctgccccacaaaaccaagcgaggccaggccgctctggaccgtctcaaggtgtttgacggcatcccaccgccctacgacaagaaaaagcggatggtggttcctgctgccctcaaagtcgtgcgtctgaagcctacaagaaagtttgcctatctggggcgcctggctcacgaggttggctggaagtaccaggcagtgac

SEQ ID NO: 13754 - DNA, 181 bp, Homo sapiens
ttgatgcccttgctctttgagttctgggctctggaggctttggattcaaagccctgctgcaccatttactcatcatgtgactttgggaaggtgaccattctctgagcctcacttctcctcctctgcaaaatgggattccagttcctaccttgcaggaccgctgttgtagaatcatacatgg

SEQ ID NO: 13755 - DNA, 467 bp, Homo sapiens
ttgttttgttttgtttttagagacagggtcttgctctgtcacccagactggagtacaatgacacaatcatagctcactgcagcctttaactactgggctcaagacatcctcctgcttcagcctccagagagttgggaccataggtgcacaccaccacacctagctaatttttgggggaggtcttgctatgttgcccaggctggtcttgaactcctgggctcatgcaatcctcctgccttggcctcccaaagcgctaggattagaggtgtgagccgctgcaccctgccccagtacaatcttttttgaactcaaatttttgctgacatctgagtgcacacaccacagtgtaaattatgccttatcagaatctaaatgaaaatagcgaacatttaaaagctatcaccattgtagtagaatcatccttcttttttgaaatttgaagcatcccaggcttaaaatcttgtgtt

SEQ ID NO: 13756 - DNA, 459 bp, Homo sapiens
cgtgtgctgtcgcattacccctactgcgggtcccgctgctggcagcgctggaaactgggtggacggcatgggttggtctcaggatttgttccgcgccttgtggagatcgctgtcaagggaagtgaaggagcacgtgggcacggaccaattcgggaacaaatactactacatcccgcagtacaagaactggacaggtgaggtggcggcgtgggcaacgattgcgtggtcagtgattgcgaggtcagtaaaggagggaaaagtgagagcccctagtctactaacgcatcatgcgacacttagggtgtcaccggagagaatttcccgagttcgttctcccctgtcgaccccttcactctggcatcggagccctacccggcccggctctgggcgccttggcccggcctcgtgcgtccgcggtccctactacccagcgccttcccccggcgtgccccgggctgc

SEQ ID NO: 13757 - DNA, 379 bp, Homo sapiens
ttaatatccggaagtagctgtcttcctacaccttagtcaatagctaatcaaacttcttaatcatgttaatcgggtatttttaaaatgctttcagtatagtttcaatttgcttaactcttacattgactgcaactgaggatcatttcatacatttaggagccacttgtctttcctttgaactgtctctgaatgtgcccacttgtctactgagttgttggtcttttctatcagcaagcgatcttgctttttaaaggaaattagccctttgaacatgctgcatggcaactatttcttcccagcttatcactggagtcccaattttgtttatactagtttttgccatgtctaggttgtctgtttgtttgtttatttatttatg

SEQ ID NO: 13758 - DNA, 116 bp, Homo sapiens
ggtggagccagcaggattcgctgaccaattggaggcaggacgtgagaaagaggagagctgagtctttgtgacttgcacatccataaggctgatcttgccctctggtaagactggcg

SEQ ID NO: 13759 - DNA, 649 bp, Homo sapiens
ttttacaatatggaaaataataataattattatttttttaagacagtcttgtgtcttgcttgttgcccaggcttggagtgccatggtgcaatgtcagctcactgcaacctccgcctcctgggttcaagcaattctcatgtcttagcctcccaagaagctgggattacaggcatgtgccaccatgccaggctaatttttgtatttttagtagagacatggttttaccatgttggccaggctggtctcaaacgcctagcctcatgtgatctgcccacttcagcctcccaaagtgctacaattacaggcgtgagccaccaatgcccagctggaaaataattattcttaacttttaaaaactaaatagaggtaatgaggagaaataaactaaattaaaaatgcagaactttgaatcctagcttcacaaaatatctggtttaataattctgttaaattcttttattcagtaaatactgacttggtacctacagagtacaatctatttcagaataaagtgtttaaaagagcaaaatacattgatgttcaattgttgactcatctataaaatgtgaactagaaacagattgttttttcaaagagccaatttcaaacagtactggaaactgtatggatcacgtactacacatactta

SEQ ID NO: 13760 - DNA, 569 bp, Homo sapiens
ggagtacagatgagggtcttttgaaaaatggcagtagtgaaagcaacatttctggttttcttcttggaaggaggagaaaggatagcttattctgaaattaagcaacaacaacaaactgttatgtaaatggagataaaactgttgttgaaaaatattggcttatattctagataaatacatacgcccacataatcccatacagggcaaataagtatgtgtgtctctgtgtgtgtgatgtgtgcatgcatgcatgcatgcttggtagactttatctgctcactgaatactttttccaacccaatgtatggaaagtgacagatggatcagcaatggctgagaagcagttacacatatctggccagcatggttttgattgtatgttgggttgtcagccagctacacaccagaactattattttaggcggctggaagagaattattcaatgtcaatgggaagagagagatacagaaaatgaaatagacactctgtgttttcaataaggcatcagtttgtttgaagccacatctaactgtctgaattcatatgagaacttactaaaagcaatgca

SEQ ID NO: 13761 - DNA, 476 bp, Homo sapiens
ggcacgaggaggaaagcggtgcgtgaggcgggcggccagggcacgactttgaagattatccaatgagaattttatatgaccttcattcagaagttcagactctaaaggatgatgttaatattcttcttgataaagcaagattggaaaatcaagaaggcattgatttcataaaggcaacaaaagtactaatggaaaaaaattcaatggatattatgaaaataagagagtatttccagaagtatggatatagtccacgtgtcaagaaaaattcagtacacgagcaagaagccattaactctgacccagagttgtctaattgtgaaaattttcagaagactgatgtgaaagatgatctgtctgatcctcctgttgcaagcagttgtatttctgagaagtctccacgtagtccacaactttcagattttggacttgagcggtacatcgtatcccaagttctaccaaaccctccacaggca

SEQ ID NO: 13762 - DNA, 438 bp, Homo sapiens
agaaagttaagtaacgtcctgaggctggaggggccccgctcctcctcaccttggggagaaggacagcgtgaggctagcctgccctacactgtgtggccccttcccctggcctgaagttgcagcacctgcaggctaaaccagcacatgcatgagggctgctgggccggggcttagggagcagccgatgctcctaaaaccctgctctgggtggactctagggatgcagttcgggtctgtgtctggggctggcagacaagcccacgtgcccacctctgcagaatgagaagtacgggtgggcaccaggccctgcccctcacgttctgctctttctctaagaactgcagaaccttggcaagccctttgcctctgcgtggggtgcccgtgtgcccctcatgaggataagcccttcgcccctgcgtggggtgcctgtgtgcccct

SEQ ID NO: 13763 - DNA, 538 bp, Homo sapiens
ggcacgagaggagatcgggacagagcatcctaagattcaggagattttcctagtcacagggagcagtgaattcagcaggccccaaggtaggaaggagtttggtctgtccaaggaacgcaagaaggtcagtgcatctgatgcagagtaagtctgaaggagagaggtcagggctgagatcagggaggtcgtctgaggcccctctgagggggacctgataaatgggtttgaattcattttgaagtgtaataggtccatattagaagcagaaactataaaaggagttatgctgataaacctagggatcataacagcacgaaaaaggcaattgataatatgacacaagcaagaaaaaattcacgtgattaaaataatacacttgcagagcttacaaagagaaatgtgagtcatccaggaaatctagttacatctaagtcttcattcatcttaccagataaatgaaatgctgaaatcttagttgcttgcatacataacacacagatattcttttatataacacattcatgtcataaaacatgtg

SEQ ID NO: 13764 - DNA, 579 bp, Homo sapiens
tctgtgcataaatggacatggattatatgtgttatagcaacctatcaccttggcaccttgttatcagcttactgacattcaaactccaagacagctagaagaatgactcttttccaccaaacagtattttaaacaaaacttaaacccaaagtgggatttggagttcacctctgagctcatggaaatgtgaataaggtctaagaccaggtcaaagtggtcaaatagcttggaattcattcagatattttttccttgtcaattaaaaaagggataattttctcttgccagtgagtagcctttggtttgggaatattgtataacccaagaaaccatcttaataaattagccaggaaatacactgcttgagcactcttgttgtttggcctatggggagaccatatggctaaatgggccaggggggataaaatggggcaggaaatatgcatgatgaacatcagggaattgcaatttttgtacattcacaatccaccacaattcattgcaccaaattcctttcattttttgtcactgatcacattcttatgaagcaacttctagtatgttgggtctataaaaacc

SEQ ID NO: 13765 - DNA, 349 bp, Homo sapiens
gtcttctctatggaggatatggcaaagacatacaaaattatatatacgtatccacacattaataactctatttctatattaaaaacatgaccacaagccaacacttttaattccactgcagcactgctgggttatttcttgctttccaaattcccttgtctgtagctatctttcatcacttgcaaaaatagcacgtgctcaatcctagattaaaatataagctactctcagaattgataactcataccactctttttaaaaatcaactaaccagaattcagtttttattcacagttcttatctttagctcagggcgtaatataaaagcactaggtttaaaacttacttg

SEQ ID NO: 13766 - DNA, 609 bp, Homo sapiens
gactttccctttatgaagaaaaatattcctttgaggaaaaaaaatcctcttattttgtaaagtagttccaagagacagctggcatattcaagatataacaaccactctagagagcaatgaatacaaacacacacaagaaaatctgtcacttaatggctaatattcgtaaactatcaacagagaaatgaagttcgtaattcagacagaaaacccatttgctcagtgtgttgctgataaaacatgcaacataagcaaattattaaaaacctaactgtagcaggtcgatagagagctctgcttctgtccccataatcccattattcaattaagcaatactacaggtagaacaggggacacaataattatcaccaacaacattgccattcatgcttctaccgcaggccaaacttccttcagatttttgtggaaggtatttgtatgtcataaatacataaaaagtcaagacacagataaattacctctattatcttttccaaggatgatccaaagaaaatgtcaaatctaagctgaaactcttagctgagtctggtaaagatatacttttatgtctttccttattataaatatctggctcatcattttcctcat

SEQ ID NO: 13767 - DNA, 572 bp, Homo sapiens
atgttctaagccttgtcttcaacaagaccattacagttgataaagtagtgaggtccacagggaaatttcctgcagcaacccagtaacatcaaaccaaagccaaaggtttggagccaggaaaggggctgagggagctggcaaattgcataatacctaaaactcttaggaaccaagagatatgccaagtaacaggtagcaaacttaaatgtgtacagtgtcttggcaagtagcaggagtgtgtaaagctgcttcgactgagaagggagacaataaggtatggtggagattgtggcaaagtagagaccacatgccctctactcagcactggccaattgttacctcctcttccaattttcaagtctaatgggaaagctatatttttatatgaaacctctgaattggcatttctctcagcatttttattttgtttttacatcatgtgtggataagacaaaacatgtctgcaggtaggcaatatctcctgaggcagtggaatggtccactgagttttctccttcagaaataaaacctatagctgtgacttgtctctgggctggggcaagacaaggctg

SEQ ID NO: 13768 - DNA, 355 bp, Homo sapiens
tcttcttggctccttttaccatctgaaatgacgtgtgaacagggtgcagtggcacatgactataatcccagcacttggggaggccaaggtgggagggttgtttgaggccagaagtttaagaccagcccaggtaacatagcaaggcctccatctctacaaaacaaacaaaattgatcgcgccactgcacttcagctctagcctggatgacagagtgagattctgtgccccaccccccacaaaaaaatagaataagaagtgatccccagagccctaaaatcctgaccgtcccagcgggacaaggctgaaaggtgttcagtggattctgagggacaaagaggtgggctgggctgggct

SEQ ID NO: 13769 - DNA, 500 bp, Homo sapiens
tacggctccgagaacacgacagaagggttgccttttcacactcgtatgagatgtgcctcccttgaaccttgttatgatgttggcacattacccatctgatgtgaaaaagaaaaataaggaaaaaaataaataaagctgtcactttgtgtatttgaaaactgaaaataatgtacaaataaactgatagagttaaattaatttcaattctatcaacaagtcaaacgaggtcacagctcaacatgcaaaaattaattgtatttatgtatacaaccaacatttttttaaaaaattataaaatatccttttctgtagcatcaaaacatgagtaccgtaaaataaatacaacaaaatatgtgcaaaacctgaagacaaaaaaccaatatgaatgattaagataaattaaagaagaccaaaactggtgggttaagataacatagttactgattgaaaaaatcaatatggtaaatgtgttaattctccccaaactgataaaacattca

SEQ ID NO: 13770 - DNA, 84 bp, Homo sapiens
cacagtcataacagcaatagctcacctaagtttttcagtagtcatccttatcattaaattaatcagggaatgttcacattcctt

SEQ ID NO: 13771 - DNA, 456 bp, Homo sapiens
aaaaacctgactcatcagtgctggtgtgactcacaggccaacaaaactggcttgccagactggttgggaggggaacctgctgctgccaccataactcggggctgtgggcaggtaaagcccatccctccatccctctggctgtagaggacgcatcctacccaccgccagatgcagggcctgggtggtgggcctggctggggcaccactctcagcctgacccccgccctggaacagccacagctgcttcaggaacttattagcgaggggcggagctgggagggaagacaactcaggggctttggaacacagagaggtggctttaagaatcagagaggaggccgggcgtggtggatcatgcctgtaatcccagcattttgggaggccgagacaggtggatcacctgaggtcaggagttcgagaccagcctggtaaacatggtgaaactccatctctact

SEQ ID NO: 13772 - DNA, 489 bp, Homo sapiens
ggggtttattttttgagcaaaatggtcatttgccaagaagttctcctgtcagaagttctccagaaaattccaagacttacctgggaacaaaagaaagcctgctagcccagaaatgagaattttaattttgatcagctctcaggagatctgtgggaacctcaatttgctcagtgtctttgaaacactgcagtcttgtgtatactgagtgggtggccatggtagtgtgccatacacaggtgcaataaaaaatagcttatcaactcctgacttcaggtgatcctcccgcctcagcctctcagccttgccaacatggtgaacctctgtctctactaaaaatacaaaaaattacctgggcgtggtggtggacatctgtaatcccagctactcgggaggctgaggtgagagaatttctggaacctgggtggcagaggttgcagtgagctgagattgcaacattgcactccagcctgggtgacagagtgagactct

SEQ ID NO: 13773 - DNA, 83 bp, Homo sapiens
tttctcaaaaaaattgatctgcaaaatggcgatggtaaatgctgcacagcagtgatgaacatggtaaatcatcacgtatgatg

SEQ ID NO: 13774 - DNA, 531 bp, Homo sapiens
  misc_feature 437: n = A,T,C or G
ccaagtacccacactcttgtgaagtctcctcccacacgcactataccagggttagtctgtttgaacaatagcagatgtggaagtgatggtaagtcatttctaagattagactttgaaagagtataatttccacgttgagctctcttgttctctctgtctctttgtgtctttgtcgctctctctctctctgatctattgctggaaaagaggagtgagaaggggaaaggagtgaaaaacaagttgctatattgtgaacagttctatggagaggactgcacggtaaaaaaaaaatggagcctccagccgggcgcggtggctcacgcatgtaatcccagcactttgggaggccgaggtgggcggatcatgaggtcaggaaatcaagaccatcctggctaacatggtgaaatcccgtctctactgaaaatacaaaaaattanctgggcgtggtggcgggcgcctgtcatcccagctactctggaggctgaggcaggagaattgcttgaaccccggaggaggaggttgcggtgagcc

SEQ ID NO: 13775 - DNA, 463 bp, Homo sapiens
tacggctgcgagaagacgacagaagggaaagatgtagatgcagacatgaaaatgcatgcaaatacatacacatgtagataaatatagataaagctatcaaaggcatcttcctttcaatcttcttttgagtataattcggaatttatcctgagaaatactgataaaatatagggctaggcaaatataatttgggatgctgtagagtgttattagtagaaacgacttctcttttctgagccttgtgaaatagctttcaaggggcagctggtagtgatttaagggcagtcacagagacagccaattagagttaatcagtcattatatttacagcatcagactatcatgcaatacaaaacggatgccgacttgaccttttcatcccctatatttccttccccatctcaaacagcagccaatcttatgcaattggcttcattatgaataatgggaagcatcttacatt

SEQ ID NO: 13776 - DNA, 553 bp, Homo sapiens; identical to SEQ ID NO: 9077

SEQ ID NO: 13777 - DNA, 180 bp, Homo sapiens; identical to SEQ ID NO: 9079

SEQ ID NO: 13778 - DNA, 554 bp, Homo sapiens
taatttaaaaagttttctataattataggctacatgctttcttaggtgaattctatcaaacatttaagaaagtacagagaatcctcaacttacagtggtttgacttgtgctcttctgacttgataatggtgctttcatctgtgtacattaatgatgagcatcaatatgaccagtttttcactatcagtatagttttcaataaatttcatgagatactgaatattttaaaatgggccttgtggtagatgattttgcccaattgtaggataacgtaagtgttctgagcaagtttaaggtaggtgaggctaagtcatgatattcagtaggttaaatatattaaatgcgttttagacttacaatattttcaatttaggatgagttcattaagacataagacaattgtaagttgaggagtatctataatatcaatcttgaacggactctttttaagaaatagaatttaagggccgggcacagtggctcacacatgtaatcccagcactttgggaggccaagatgggcagatcacctggggtcaggagtttgggaccaac

SEQ ID NO: 13779 - DNA, 95 bp, Homo sapiens
taacaaatttgtcatcccaagtggaagaaaactggacccatttgcaatcactcttaaatcaaagcatgtgtattttaaattatctcaaaagtgct

SEQ ID NO: 13780 - DNA, 524 bp, Homo sapiens
ggcacgagatttgttgggcctgggctactgctcaccctggttaggtgagcctctaggaaaacttaaaacaaattttaagccaggtatggtggcacatacctgtggtctcagctattcaggaggccaaggcaggaggatctcttgagcccaggagtttgagaccccatctcaaacaaaaaatacaaaaattagccagccacggcgcctgcacttccagctcctttgagagactgaggcaggaagattgcctaagcccaggaggccaagtctgcagtaagctatggtaacaccactgcactccaacctgggcaacagagggagactctgtctctaaaaaaatagaaaaatttgccctgcatggtggctcacgcctgtaatcctagccctttggaaggccaaggcgggcagatcacttgaggtcgggagttcgagaccagcctgaccaacatggagaaaccccatctgtactaaaaatacaaaattagctgggtttggtggcgcatgcttgtaatcccagctactcg

SEQ ID NO: 13781 - DNA, 498 bp, Homo sapiens
ggcacgagggtttaatgagccctgtccagggcccttcagtggggagcctccttcttcttgcccttctccttcttgcccttctccttcttcttcactttgggcttcttggccttgcccgggatgctctcgtgctgcttggagccagcagcgtgggactgtggggccgagggcagggatgggagagaagagatggttctgggctggaagcgagacagggggaccactccccgcaccctccccgccagccccagtgcggggacgcctctctggggtgcagggcacgtgcttggggacgctggcgagagccccttaccttcacatccgtgtccgaatcgctggagctgctgctggagtcggaagagctgtggtgtccttgctggatggaggtgcggcagtgaggcggcgccccttacccagccccctgaagttggaggcctaaggcaggaccctggggtcaggggcaaccccagccttcccgcccctccgcagccggtgatg

SEQ ID NO: 13782 - DNA, 585 bp, Homo sapiens
ggcacgagagagaaacaagggagacaagggtgcccagacaggtgcggggctcagccaggaggcagaagacgtggacgtgtcccgggccaggagggtcacagatgcaccacaaggcactctgtgtggcactgggaacaggaattctgggagtcagtctgcaagggcggtgggcgttgctcacctgggagaagcctttagagtgggcgttgagcaggccattagctcgtgccctgaggaggtgcatgggcggcatgggctctccatggaaattatgtgggcgcaaatggatgtggctctgcgctcacctgggcgaggacttctggccggtgccggggcactctgcatgaccctggcagaatcgagctgccctgactatgaaaggggaagaagagcatgcctgaccctccaccggcaccccacccctcactgctccacctggggcctgcctctgcgggtggctgggtcctggctgactgttgtgactgttgaggccctggggcggtggcgcatgggagttaggaggactggccaggtggggaccactatgcacccacccccagtgtcaggtgcttctcctctcctcct

SEQ ID NO: 13783 - DNA, 576 bp, Homo sapiens
ggcacgagggatggacttcgtgtagatctgctgacgatcacttcctgccatgggcttcgagaagatcgagagccccgtctagagcagctatttcctgataccagcacccctcgaccattccgtttcgcaggcaagaggatattcttcttaagcagtagagtacacccaggggagactccatctagctttgtcttcaatggctttctggacttcatcctccgacctgatgatccccgggcccaaaccctccgtcgcctcttcgtctttaagctgattcccatgttgaaccccgatggtgtggtccggggacactaccgcacagactcacgtggagtgaatctgaaccgtcagtacctgaagcctgatgccgtcctgcacccggccatctatggggccaaagctgtgcttctctaccaccatgtgcactctcgtctgaactcccagagttcctctgagcaccagcccagttcctgtctccctcctgatgctcctgtttctgacctggagaaagccaacaatctccaaaatgaagctcagtgtgggcactcagctgacaggcataacgctgaagcctgg

SEQ ID NO: 13784 - DNA, 388 bp, Homo sapiens
  misc_feature 190, 271, 353: n = A,T,C or G
gacacaaatacacaaggaaagctccatggaagataaaggcagagatttacaagccaaggaatgtcaaagacggccagcacaccaccagaagctagcagagaggtatggaacagattcttcttcacaacctcagagggaaaaccctgctgatacctggatttcaaactcctggcctccagaacgagacggngttttaccacgttagccgcgctgggcttgaactcctgacctcaggtgatccacccgcctcgatcgccattataacaatcanatggctgtcttcatggactggtacaaaacagaatatacaccatggacagacagaggctcagaacacacacactctacaccantgatcttgcaacctgacaaacagcatgagaaggac

SEQ ID NO: 13785 - DNA, 380 bp, Homo sapiens
ggcacgagatgtgatgatagtaactctgaagcttatgtctgtagcttttgcagtgttcacaggttggagacttaaacttttttaagtaacatagttcagttgtttttttttttggaatatatccttggcagttgggaggactttttccaaagggcaaaggggagttgaagttttacttgcctttgcttattaccattactttttccccaaggaatgaacatactgattcctttttctcctcctccaagctcccaaaacaaaggttaaacagtcttgggctatttttagttggagcttgcctaatcaaggaatttttttataaaaaaatttaaaagttcaacattagtaatcgtattatttttaccccatttttttttgac

SEQ ID NO: 13786 - DNA, 283 bp, Homo sapiens
cctggagagccttatcatgtattttatatgcttatgtggtgttggatgacatcatggaccatatagcttttatagagaatttttctcaccatagaactgaggtctcaccaggtgatctactatgcaaattcctacagttttctattcttaagaaataagggccgggcacggcggatcatgaggtcaggaaattgagaccatcctggctaacacggtgaaaccctgtctctactaaaaatacaaaaaaaattagccgagcatggtggcgggcacctgtagtccc

SEQ ID NO: 13787 - DNA, 402 bp, Homo sapiens
  misc_feature 270: n = A,T,C or G
aaagatgaagcttaacactgaggtgagagagattggacctttgtcaaagaagggattctatcttgcctttcaggatgtaggggcttgcatagctttggtttctgtcaaagtgtactacaagaagtgctggtccattattgagaacttagctatctttccagatacagtgactggttcagaattttcctctttagtcgaggttcgagggacatgtgtcagcagtgcagaggaagaagcggaaaacgcccccagggatgcactgcagtcagnaaggagaatggttagtgcccattgggaaaatgtatctggcaaagcaggcttaccagcaaaaagggagacactttgtggaaccctgtgggccgtggggttcttacaagtctttcctcttcaagatctttcagt

SEQ ID NO: 13788 - DNA, 567 bp, Homo sapiens
  misc_feature 547, 548, 549, 550, 553, 554, 556, 557, 558, 559, 560, 561,562, 563, 564: n = A,T,C or G
ggggttctccaaggaagttctgtagcctcagtgtatgatgggaagctgctcataggcactttataccacagagccttgtattgtgaactctaaattgtacttttggcatgaaagtgcgataacttaacaattaattttctatgaattgctaattctgagggaatttaaccagcaacattgacccagaaatgtatggcatgtgtagttaattttattccagtaaggaacggcccttttagttcttagagcacttttaacaaaaaaggaaaatgaacaggttctttaaaatgccaagcaagggacagaaaagaaagctgctttcgaataaagtgaatacattttgcacaaagtaagcctcacctttgccttccaactgccagaacatggattccactgaaatagagtgaattatatttccttaaaatgtgagtgacctcacttctggcactgtgactactatggctgtttagaactactgataataacgtattttgatgtttgactacatctttgttaccattaaaagtggagtatattaagactactnnnnaannannnnnnnnngga

SEQ ID NO: 13789 - DNA, 529 bp, Homo sapiens
tgacactatagaacaagtttgtacaaaaaacaggctggtaccggtccggaattcccgggatatcgtcgacccacgcgtccggggacttctgacctgctggccagccaggacctgtgtggggaggccctcctgctgccttggggtgacaatctcagctccaggctacagggagaccgggaggatcacagagccagcatggatcctgacagtgatcaacctctgaacagcctcgatgtcaaacccctgcgcaaaccccgtatccccatggagaccttcagaaaggtggggatccccatcatcatagcactactgagcctggcgagtatcatcattgtggttgtcctcatcaaggtgattctggataaatactacttcctctgcgggcagcctctccacttcatcccgaggaagcagctgtgtgacggaaagctggactgtcccttgggggaggacgaggagcactgtgtcaagagcttccccgaagggcctgcagtggcagtccgcctctccaaggaccgatccacactgc

SEQ ID NO: 13790 - DNA, 608 bp, Homo sapiens
  misc_feature 188, 189, 496, 521, 526, 599: n = A,T,C or G
ttatacagagaaattcggaataccaggaacttaacttacatagaccctgatgccctcaaagagctccccctcctaaagttccttggcattttcaacactggacttaaaatgttccctgacctgaccaaagtttattccactgatatattctttatacttgaaattacagacaacccttacatgacgtnnatccctgtgaatgcttttcagggactatgcaatgaaaccttgacactgaagctgtacaacaatggctttacttcagtccaaggatatgctttcaatgggacaaagctggatgctgtttacctaaacaagaataaatacctgacagttattgacaaagatgcatttggaggagtatacagtggaccaagcttgctgctgcctcttggaagaaagtccttgtcctttgagactcagaaggccccaagctccagtatgccatcatgatgcctgctaaggaggcccaccttggtgtacatggctcacagangctctgttcatggagcagctgctgnttganaaattttgaaatgcaagatccacaactagatggaaggcatctgtctttgcagaaaaaatggtcctgaatgtcntggcccaag

SEQ ID NO: 13791 - DNA, 441 bp, Homo sapiens
tccaccgcggtggcggccgctctaaaactagtggatcccccgggctgcaggaattcggcacgagcggcacgagtgcacacggcgccgctactggccgccgccggcctccacgccgcgcctatggccgccgagcgcgccgtggctttcatggaccaggtgcgcgccttccaggagcaggtggacaagctgggccgcctgcaggtcgactcggccgagtatggctgcctcaaggccatcgcgctcttcacgcccgacgcctgtggcctctcaaacccggcccacgttgagagcctgcaggagaaggcgcaggtggccctcaccgagtatgtgcgggcgcagtacccgtcccagccccagcgcttcgggcgcctgctgctgcggctccccgccctgcgcgcggtccctgcctccctcatctcccagctgttcttcatgcgcctg

SEQ ID NO: 13792 - DNA, 781 bp, Homo sapiens
  misc_feature 26, 553, 586, 631, 649, 678, 689, 701, 713, 721, 727, 733,745, 750, 763: n = A,T,C or G
agtggtgcgccaacgtgagtacgagnacccgtgcgcggctgcgctttcctgtccccaagccgttctagacgcgggaaaaatgctttctgaaagcagctcctttttgaagggtgtgatgcttggaagcattttctgtgctttgatcactatgctaggacacattaggattggtcatggaaatagaatgcaccaccatgagcatcatcacctacaagctcctaacaaagaagatatcttgaaaatttcagaggatgagcgcatggagctcagtaagagctttcgagtatactgtattatccttgtaaaacccaaagatgtgagtctttgggctgcagtaaaggagacttggaccaaacactgtgacaaagcagagttcttcagttctgaaaatgttaaagtgtttgagtcaattaatatggacacaaatgacatgtggttaatgatgagaaaagcttacaaatacgcctttgataagtatagagaccaatacaactggttcttccttgcacgccccactacgtttgctatcattgaaacctaaagtattttttgntaaaaaaggatccatcacagcctttctatctangccacactataaatctggagaccttgatatgtgggtatggaagangaattgtcttaagtgtanaatcatgaaaagacttacagcctttcatntcccaaaaagngtctgacagganggatgattgganattttganaaacanctacanttgcctgaattnctgantttgcaaaatgcnaaatctgtggaaaatttt

SEQ ID NO: 13793 - DNA, 830 bp, Homo sapiens
  misc_feature 437, 441, 443, 573, 600, 648, 679, 699, 713, 733, 760, 776,807: n = A,T,C or G
agagcacaaggagcctccagcctgccctgtggacataccaccccccagcttggcctccccaccagcccgctgagcaggctgccacccccgatgctgagcctcacagcgagcctcctgatcaccaggagcgccctgccgtccaccgtgggatccgctacctgttgtacagagcacagagagccatccgccttcgccatgccctccgcttgcaccctcaattgcatcgggcccctattcggacttggtctccccatgtggtccaagccagcactcctgccatcacagggcccctcaaccatcctgccaatgcccaggaacatcctgcccagctgcaaaggggcatcagcacccccaccggatacgaggggctgtggatcccgcagccgctccctccgggctcctcccatttatcccagtggctcaacaacttttttgcnctcncnttctcctccatggcttcccagcttgacatgtcttccgtggtgggggcaggggaaagcagagcccagactcttggagcaggtgttcccctgggaacttctgtcagaggctccatggaggcctctcaagtcnagtgcttctggaagcctctccaattanattccaacaacctgtgccccagaaaggccccccattaagccaattccnaggggccgtcaagaaggctttgagagtgtanctttcttgtaacttgcagcnaaaaccttgccggncctgagttgcttcttcagcnaatgttttaaaggcttgaaagatagantcattattctggtaangatggattaacgatgaatggtatgattgacnttggaaggaaattgggtttcctg

SEQ ID NO: 13794 - DNA, 437 bp, Homo sapiens
aatccataggtgccatcgtggttgagacaagtgcaaaaaatgctattaatatcgaagagctctttcaaggaatcagccgccagatcccacccttggacccccatgaaaatggaaacaatggaacaatcaaagttgagaagccaaccatgcaagccagccgccggtgctgttgacccaagggccgtggtccacggtacttgaagaagccagagcccacatcctgtgcactgctgaaggaccctacgctcggtggcctggcacctcactttgagaagagtgagcacactggctttgcatcctggaagacctgcagggggcggggcaggaaatgtacctgaaaaggattttagaaaaccctgggaaaacccaccacaccaccacaaaatggcctttagtgtatgaaatgcacatggaggggatgtagttgcatttttgct

SEQ ID NO: 13795 - DNA, 589 bp, Homo sapiens
caacatttgtctacaactctactgtaaaattggaaatgcttttccacagaaaaacctctcaaaatgctgaatgcaaaagttgggatcacagaaacattgtgcctatttttggtctgctggaaactgtatttttacaaggtaatccctgttttcaatatagttcctgtcttgccactggcggttttcttgtagcatttttctagttctgagattgctactacccaaagtattcatttctttcttactggggtgtcctctgtcttcacagcctgcttctggattgtaggttttttcctttctttctgttgagatatttatggcatttgatagagtcaaaccagatgtattgcagccggacatacttatgtggcttcagatgtgtaaaataagtaacttcctatctttgtctgtctagctcaagagttgactgtggacgaggaatgcctgtattgattcattaatgtaataactatttactgactgcctaccatgtacaaccagaaacacagttcctaacctcatgaacttaccatgtaacatgggaagacaagcactaagttcttatttgtttgtaattgtgataaggctc

SEQ ID NO: 13796 - DNA, 156 bp, Homo sapiens
tgatcagaaagctggggactcacaaattttaccaaaaatcaaacctattcctcagctccacggctacctgcgatctgtgtttagctctgacgaatggaattgatcctcacaacattggtgttctaaatgtcttaagaacctaattaaatagctgac

SEQ ID NO: 13797 - DNA, 459 bp, Homo sapiens
  misc_feature 160: n = A,T,C or G
cgactcactatagggaagctggtacgcctgcaggtaccggtccggaattcccgggtcgactactactactaaattcgcggccgcgtcgacgcagaatggctcccgcaaagaagggtggcgagaagaaaaagggccgttctgccatcaacgaagtggtaancccgagaatacaccatcaacattcacaagcgcatccatggagtgggcttcaagaagcgtgcacctcgggcactcaaagagattcggaaatttgccatgaaggagatgggaactccagatgtgcgcattgacaccaggctcaacaaagctgtctgggccaaaggaataaggaatgtgccataccgaatccgtgtgcggctgtccagaaaacgtaatgaggatgaagattcaccaaataagctatatactttggttacctatgtacctgttaccactttcaaaaatctacagacagtcaat

SEQ ID NO: 13798 - DNA, 71 bp, Homo sapiens
tggtacgcctgcaggtaccggtccggaattcccgggtcgactactactactaaattcgcggccgcgtcgac

SEQ ID NO: 13799 - DNA, 702 bp, Homo sapiens
  misc_feature 514, 635, 638, 675, 677, 679, 695, 698: n = A,T,C or G
gggcttctgggcaatgccaagcccaggtacttctacacatctgcctaacttgggaatgaatgtgggagaaaatcgctgctgctgagatggactccagaagaagaaactgtttctccaggcgactttgaacccattttttggcagtgttcatattattaaactagtcaaaaatgctaaaataatttgggagaaaatattttttaagtagtgttatagtttcatgtttatcttttattatgttttgtgaagttgtgtcttttcactaattacctatactatgccaatatttccttatatctatccataacatttatactacatttgtaagagaatatgcacgtgaaacttaacactttataaggtaaaaatgaggtttccaagatttaataatctgatcaagttcttgttatttccaaatagaatggactcggtctgttaagggctaaggagaagaggaagataaggttaaaagttgttaatgaccaaacattctaaaagaaatgcaaaaaaaaantttattttcaagccttcgaactatttaaggaaagcaaaatcatttcctaaatgcatatcatttgtgagaatttctcattaatatcctgaatcattcatttagctaggcttctggtgactcnatntgcatctaggaagtctatttctggccaactgtgctantngnaagcttccttagtgtnaanttac

SEQ ID NO: 13800 - DNA, 530 bp, Homo sapiens
tcggcacgaggtacgtggccactaggtggtacagggctcctgagacatgctgaactggatgcattacaaccagacagttgatatttggtcagtgggatgcataatggccgagctgttgactggaagaacattgtttcctggtacagaccatattgatcagttgaagctcattttaagactcgttggaaccccaggggctgagcttttgaagaaaatctcctcagagtctgcaagaaactatattcagtctttgactcagatgccgaagatgaactttgcgaatgtatttattggtgccaatcccctggctgtcgacttgctggagaagatgcttgtattggactcagataagagaattacagcggcccaagcccttgcacatgcctactttgctcagtaccacgatcctgatgatgaaccagtggccgatccttatgatcagtcctttgaaagcagggacctccttatagatgagtggaaaagcctgacctatgatgaagtcatcagctttgtgccaccaccccttgacc

SEQ ID NO: 13801 - DNA, 730 bp, Homo sapiens; identical to SEQ ID NO: 268
  misc_feature 570: n = A,T,C or G

SEQ ID NO: 13802 - DNA, 585 bp, Homo sapiens
cgtcttaaaatatatttaggaaatgtaaaattaaagattaaaaattttattctatgcaacataaaataatatgcataaatctggcacataatttctttgtttttactttagaaaaaagacagtaagaaaaaagtttataaatttctcagtcccttttatacaaagttgcaactaaaaccagcaatcacttatatgtacaaccatcaactctgaatacaatgtgaattatacctaggaactgtaatttacctagatgagttctgcctgctttatgaaaaacacacacttatatcacagaacaccgtggcttctacaatttgtaacaattttgaaaacgaaactcctgcctccataatataaggaaacaagagtactctttccatagtcatcatcctgtataaaaaaacttcatagtctgatttacctttgtcaaaggtaaaatgattcacatttgcttggattactctgatcctcagtagttcctaaacacaaaataaagtttgcatgaacctttatctggttttccaaagcaagtattatgctggcagaagtccatgagctgaataaaaagatactaaatataaa

SEQ ID NO: 13803 - DNA, 475 bp, Homo sapiens
tggttcatggctatctggtgatgttggaataggagaggtatccatgggttcagactcttcagttgacacctccactacagtttctgtaatgacatctggcctcatagcagcatggatgaattcaggacttcttgaatccctcaagcaggtaggagattccatatgaagcagggcttcagcagcttcaattgtcttatctgtacagtgtgcattactgctgtgaactgatgcttccactgtttccacattctcggtctcaacttcttgttcttctgccacatcttgcatcatataagtctcatcatcataaaccagaacctgggctgcatagccctgctctaatctggcacttggaactggctccacaatcactgctggatattcagaaaccttttcactttcctcttgattttctactccattgctggaaagctccaaaatagtacctccactgtcaaccactgctgatgtcatt

SEQ ID NO: 13804 - DNA, 375 bp, Homo sapiens
gggccactctggatcctgggcgacgttttcatcggccgctactacactgtgtttgaccgagacaacaacagggtgggcttcaccgaggctgcccgcctctagttcccaagacgtccgcgcgccatcacaaaaacagaggaaagtcccataccaggaggcccctggcccagcggcccctcccacacacacccacacactcgcccgcccactgtcctgggcgccctggaagccggcggcccaagcccgacttgctgttttgttctgtggttttcccctccctgggttcaaaaatgctgcctgcctgtcccccccaacacctgagccaggtgaagggccccgtaaattggaaggatgcacaagttccaaggttacgtt

SEQ ID NO: 13805 - DNA, 486 bp, Homo sapiens
ggtcgacacctggccgtggacacctgtgtcagcatgtgggacctggttctctccatcgccttgtctgtggggtgcactggtgccgtgcccctcatccagtctcggattgtgggaggctgggagtgtgagaagcattcccaaccctggcaggtggctgtgtacagtcatggatgggcacactgtgggggtgtcctggtgcacccccagtgggtgctcacagctgcccattgcctaaagaagaatagccaggtctggctgggtcggcacaacctgtttgagcctgaagacacaggccagagggtccctgtcagccacagcttcccacacccgctctacaatatgagccttctgaagcatcaaagccttagaccagatgaagactccagccatgacctcatgctgcttcgcctgtcagagcctgccaagatcacagatgttgtgaaggtcctgggctgccacccaggagccagcatggggacagctgct

SEQ ID NO: 13806 - DNA, 644 bp, Homo sapiens
tccaccgcggtggcggccgctctagactagtggatcccccgggctgcaggaattcggcacgagagatggtggctgagctgtgggctcacgaccccgaccccggcccgggggtgagcgccgggctccgtggggaggaagcgggggccaccaagggacagaagatgagcctgtcggtcctggagggtatggggttccgtgtgggccaggctctaggcgagaggctgccccgggagacgctggccttcagggaggagctggatgtcctcaagttcttgtgcaaagacctgtgggtggcggtgttccagaagcagatggacagcctgcgcaccaatcaccaggggacctacgtcctgcaagacaacagcttccccctcctcctcccgatggcctctggcctgcagtatctggaggaagcacccaagttcctggccttcacctgcggcctcctgcgcggcgccctctataccctgggcattgagagcgtggtcaccgcctccgtggcagccctgcccgtctgtaagttccaggtggtgattccgaaatcctaagcctgcctcgcacctgctgagccgcactgctgcccctggcctcaccggcctcaggagacggtggggccgctgcatttcggggtggtcttgggaatc

SEQ ID NO: 13807 - DNA, 457 bp, Homo sapiens
  misc_feature 11: n = A,T,C or G
aggggcaaggnacagcttttggtatgctaaagaatttgggaaagatgctgttggtgtaggggcggggagactagaaacaagatctttccatgggcagagctcttcagagcttgataacaaagtttggtctgcagcctttgtcaaataattataaactctccagttgaaacagggaaatgtgggctggcgtggtggctcacacctgtaattccagcactctgggaggctgaggcaggtggatcacttgaggtcaggagttcgagaccagcctggccaatatagtgaaaccccatctctactaaaaatacgaaaattagctgggtgtggtgatatgcacctatagtcccagctactcaggaggctgaggcaggagaattgcttgaacccagaaggtggaggttgcagtgggctgagatcatgccaacacactccagctgatagagtgagactctatttc

SEQ ID NO: 13808 - DNA, 568 bp, Homo sapiens; identical to SEQ ID NO: 10622

SEQ ID NO: 13809 - DNA, 479 bp, Homo sapiens
  misc_feature 322, 335: n = A,T,C or G
gctttggtggcccagcggctggaacagctggtccaagagcagctgaaatctccgcccagcccagaattacagggtcccccatcgacagagaaggaagccatactgcggaggctggtggccctgctggaggaggaggcagaagtcattaaccagaagctggcctcggaccccgccctgcgcagcaagctggtccgcctgtcctccgactctttcgcccgcctggtggagctgttctgtagccgggatgacagctctcgcccaagccgagcatgccccgggcccccgcctccttccccggagcccctggcccgcctggccctanccatggagctganccggcgcgtggccgggctggggggcaccctggccggactcagcgtggagcacgtgcacagcttcacgccctggatccaggcccacgggggctgggagggcatcctggctgtttcacccgtggacttgaacttgccattggactg

SEQ ID NO: 13810 - DNA, 784 bp, Homo sapiens
tgagaggaaaaaaaagcccactggaattgtctaaactgcaatgcaatctcttgctcatttaaaagatctcattttctaatcatgtgctttgagacatttaatactatttcaattatgcagaggaaataatataattcctttatttgaaaaatgatactgaacctcagagatcagttaaatctactgctggaatggggattctttctaaaccgtgttgttccctctcttcaaacagctggagctgtacacagatggaaaaacatttggtcagaaagcagcaaattagtgtttttcaggaccgaattcggctcccgcagctcctgcatctccattcgtctagattttatttcttctttgcattgacatttttgcagacccagttcatgccatcctgaacgccctcttctgtgagagctgagcaagactggatctgccagactcggtcgcggatggtatgcaggttcagtccttctgcaatttcagaggcaggggctgctgtgagcaaatcctgcttattagcaaagatgagcactggcacacaacttagtttttcttcctccagtaattccgctagttcctgacccgtctcttcaaatctttttctgtctgcactgtcgattacatatataagaatatcggtattttcaaaataattcttccagtatggtctgattttcctctgtccaccaatgtcccatacattcagtttaaaaccttgtgattgtacactttttatgttgaaaacccttgtgtagggtgtatggtggctgatgtcctcaaatgc

SEQ ID NO: 13811 - DNA, 434 bp, Homo sapiens
tttaaacagactaatttatccattagttctatccaagatgtatctggaacatctcattaatgccttctccagtttgtgctgaagtttcaaagtacaggaaccctttgctttcagcccaaagacgtccttcactttcatctacacagcgatgtttggtacaatcaatcttgttggcacaaactacaaatataatattttccatgtttccatgaggtccaagctcttgcttcatttctgccagccacgcatcaagggcgtcaaaggagtctttctgcccaacatcatagaccagtatcacaccctgtgtgtccttgtaaaactcatttcgaactagttttgtgatcttgggcaagtcacttaacctctctgcgtctcagtttcctcatctcatagaagaagggatgtccagccatatcaaagatgttaactttgat

SEQ ID NO: 13812 - DNA, 526 bp, Homo sapiens
acaagctacttgttctttttgcaggatcccatcgattcgccaatggatgcaggacatctgagatgggatggccgcacgttgcccaggctggtctcctgagctcaaagcaatccagattgctgggattacagctgcgagccaccgggcctggctgaaatgacttttaaaaaaagacttctctaaagtagaaggaagggtggaattgtatgcacaagatgaacaaaacctggcaagaaaaacatactaaacacgctggagtgcattggcgcgatcttggctcaccgtaacctccgcctcccgggttcaagtgattctcctgcctcagcctcccaggtaactgggattacaagcatgggccaccacgcctggctaattatgtattgatagtaaagacggagtttctccatgttggacacgctggtctcgaactaccgacctcatgagatccacccacctcagcctcccacagtgctgggattacgagcatgagccaccgtgcccggcctccctggaccagacttctata

SEQ ID NO: 13813 - DNA, 317 bp, Homo sapiens
gaccactttgtacaaaaaagctgggtacgcgtaagcttgggcccctcgagggatactctagagcggccgccctttttttttttttatcataaaaataggctggaacagaaacaactgcttgggtaccctaaaaggataaaaaataattaagggtttggccacatatttaaacccttattaaaataacagtctggccagccgggggcttttgcctataatcccaccactttggaaggctgaggcagaagaatcacctgagggcaggatttcaaaaccaccctgggcaatggggaaaaaccctgtctttcctgaaaatt

SEQ ID NO: 13814 - DNA, 557 bp, Homo sapiens
  misc_feature 399, 449, 524: n = A,T,C or G
agtagagacagggtttcaccatgttagccaagatggtctcgatctcctgacctcgtgatccgcccacctgggcctcccaaagtgctgggattacaggcgtgagcccccgcacccggccaaaggcaggattatttgttaagcgggttgcagtgttctaccagaccccccaccctcaacccaagcccctggtctcactgggacttggccactgccaggagcgtctggcccttcacggcttcaggcccagcacagcgcgtgtcattctgggaaaacatcttgtctttttgggcctgaagccaacgatagaggtcgctcaggttctggtcacagatccaggggttgccggagatgtcgaagccatcccgcatgtcccagtttggctgccctagggatgcccanagcccctcgggcacgctggccagtgagttattggagaggtccagcatgtncagctgccgcaggccctggaaggcaccggctgccaccctggccagcttgttgccgttcaagaagaggtagcgcangtcctgctgcggcaagaggagatcttttcccag

SEQ ID NO: 13815 - DNA, 99 bp, Homo sapiens
tgacactatagaacaagtttgtacaaaaaagcaggctggtaccggtccggaattcccgggatatcgtcgacccacgcgtccgaccacgacgtacggccg

SEQ ID NO: 13816 - DNA, 230 bp, Homo sapiens
acaagtttgtacaaaaaagcaggctggtaccggtccggaattcccgggatatcgtcgacccacgcgtccgcccacgcgtccgcccacgcgtccgggcctctgagcaagacagtgcgcttcaacgtgctcaaggtcaccaaggctgccggcaccaagaagcagttccagaagttctgaggctggacatcggcccgctccccacaatgaaataaagttattttctcattccc

SEQ ID NO: 13817 - DNA, 238 bp, Homo sapiens
  misc_feature 1, 10, 26, 65, 86, 103, 104, 108, 115, 117, 128, 143, 157,199, 203, 205, 211, 231, 236: n = A,T,C or G
ngggtccggntgccgagaagacaacngaagggagctcactgcagtctcaaattcctgggatcaanaatcttcctacctcacccctnccactagctaggacttnngccntgccccncnctgctaatttntttctgagatggatntgttttgttactgnctaactctggcttacatctctgcttggctccaagtctggatnagtngnccctgntcactttttttttttttttnggttngc

SEQ ID NO: 13818 - DNA, 677 bp, Homo sapiens
  misc_feature 409, 537, 539, 540, 541, 569, 570: n = A,T,C or G
ccactcagctaagaggtatttattcagttgctggcacctctcccagtgtaaatctggacttggctccagagaaggtgtttcattacagcgggggcttagtttgcttcctgtagttagtagcgtttcatggttttctttatccagtgtacaaagcttgagactttggtgcaggctcgtggaggcatgccattgtttcgtccataggagacaatgccctgggccaccttgttacacacaagagggcctccagagtcccccttaaaggaagtctttttaatctctgggtcccccacgcacaactcaatggtactgtcgtaataatggcgtaagtcagattcgcactttcgatcttcctgcactgtcatcttcacctcttgtagtgtgtgtgatgttttccccaggggccgtntgcccccagccggccacactgcatgtctgccctggcttcacctgggccttggttgtaggtagcctgaggggctgcacagctcttgtccgctttgccctttctctccagcttgcagtagcatgatgtcntnnngagagtcttaggattataggctggatgnnggggagggctttcacagggataaacctgttgttcggctcttgtctttgatattgtggcccccaagtgaccattatgagcttccccacagtggcaacttgtaacacga

SEQ ID NO: 13819 - DNA, 745 bp, Homo sapiens
agtgggagaccacgttttattcagtccagttcaggatccccgctatctcagggctctctgggccagtcctcctgggagcccccaccacaacacttcccaggcatgagccctcaggggcccacatgagcttccacacactgagaagtgtccgagaaattggtggggcctctgaaggaggctgtgagcagcccacctgaactcccagctcaccagcccaaacagggtgcaggggctctggccctgaagaacctgagtggagtggaatggcactggctggccactcagctcagcgggcgacgtgcccctacaagttggcagaagtggctgccactgctgggtttgtgtaagagaggctgctgccaccattacctgcagaaaccttctcataggggctacgatcggtactgctagggggcacataacgcccatgggtgtggtaggtggggtactcgctcataggatggtaggtatcccgggctggaaagatgtccagctgcccgtagttctttcggcggcactgacagacagccaatgcaatgagatagacaatggccagcgcaaccagaacacagaccagcaccagcagcgcgatgccccagcctggcaccccagccccagactgagcagataaaagaatggcacatcactcacgctgacgtctgagatcgtcaagttatatcgagtagctgcttacgtgatatactgattggaaccgagctacacatcgagagacatgatggtgacc

SEQ ID NO: 13820 - DNA, 422 bp, Homo sapiens
  misc_feature 39, 48: n = A,T,C or G
gactagcagaagcacagctaggcccaatggccaccccangcactccanatttgccagttcaaattggtcctgctgggagaatctgcagtgggaaagtcaagcctggtattacgttttgtcaaagggcagttccatgagtaccaggagagcaccattggagcggccttcctcacccagtccgtttgtctagatgacacaacagtgaagtttgagatctgggacacagctgggcaggagcgatatcacagcttagcccccatgtactacaggggtgcccaagctgcaatcgtggtttacgacattactaatcaggaaacctttgcccgagcaaagacatgggtgaaggaactacagcgacaggccagtccctagcagcgttgttggcctggcagggaacaaagctgacctggccacgaaactat

SEQ ID NO: 13821 - DNA, 423 bp, Homo sapiens
agggggccctgcgcctgcgcggagctggagtccggctgggccgcagccgctgggagaccggcggttgccgtggggaccggtcgggcccctccctcctccggtcccccgccccaggtccttccccaccgagacgcgccggcggaccgcgggcgagtgcagccggtgacccggcgagaggcggcgccgctcccaagatgtcgcagacggccatgtccgaaacctacgattttttgtttaagttcttggttattggaaatgcaggaactggcaaatcttgcttacttcatcagtttattgaaaaaaaattcaaagatgactcaaatcatacaataggagtggaatttggttcaaagataataaatgttggtggtaaatatgtaaagttacaaatatgggatacagcaggacaagaacgattcaggt

SEQ ID NO: 13822 - DNA, 658 bp, Homo sapiens
caagctacttgttctttttgcaggatcccatcgattcgaattcggcacgagaaaagtcccccttctgggaaagaccgagtgaagaaaggtggatcctacatgtgccataggtcttattgttacaggtatcgctgtgctgctcggagccagaacacacctgatagctctgcttcgaatctgggattccgctgtgcagccgaccgcctgcccactatggactgacaaccaaggaaagtcttccccagtccaaggagcagtcgtgtctgacctacattgggcttttctcagaactttgaacgatcccatgcaaagaattcccaccctgaggtgggttacatacctgcccaatggccaaaggaaccgccttgtgagaccaaattgctgacctgggtcagtgcatgtgctttatggtgtggtgcatctttggagatcatcgccatattttacttttgagagtctttaaagaggaaggggagtggagggaaccctgagctaggcttcaggaggcccgcgtcctacgcaggctctgccacaggggttagaccccaggtccgacgcttgaccttcctgggcctcaagtgccctcccctatcaaatgaagggatggacagcatgacctctgggtgtctctccaactcaccagttctaaaaagggtat

SEQ ID NO: 13823 - DNA, 654 bp, Homo sapiens
tacttgttctttttgcaggatcccatcgattcgaattcggcacgagattatttccaaagcagcctacagtagaaaatagtcattatggcagcagcttctgatgtttttgtttggtaggttttctgatttcaatatatagaatcatattcatagagtatcttcttttaacgaattgcacaaagtacccatttaaaatttacatgcacagttcattgccacctttcttaggcctatgcatagttaataaggttataatctactcaacatggaaaatggagcctatttgcaaacacacaagtaattaaagtaccaattctctcttagtttctttttttatagttggtttattttgcaattataaatgttaaacatccctagagatgaaagttaaaatggttgatcacagatcagtagcaaaatacaaattgacaattcaaaattataaataaaactctgttgaggatgtttaactttgagtctccaaatttaagagctaagcttggaagaaacaaatttataggttatatttccctcttaaattaaaaaacaaacttcctctggcagtagtttgtgaattcctttcattgtaatgataccatgattacaggatcaaaaatgcttaacttacttgccattctgctcacatcatcacag

SEQ ID NO: 13824 - DNA, 578 bp, Homo sapiens
  misc_feature 363: n = A,T,C or G
tacgaatttaatacgactcactatagggaatttggccctcgaggccaagaattcggcacgagggttaccaatctgaagtgggagcaatacaaagcccatcacggctacaacagaaggactcagaaggaaatctttgtgaaacaagttaatattggccttgaataccatataagaataaaaagacagtcatttgtgttctcacttctcatattttagagtagagaatatgaagtgaacaatattttttttttaaaaaggaagggtctcaagactttttgctggaaatataaatgaaacagaaagcataaacacaactgaaagagttagtgtcattgatgataccaaggatattgagaagattancaatttgcagtggtgatggataggaagaggtgggtgctaaatttagtgttacatgtccatatgcaagtactaacaagttagaaatctggtagaacctacactgatttttttattgttgctgcaaatactcattgcaaacttagaagcttaaaataacaaaaatgcggccgggtgcggtggctcacgcctgtaatcccagcactttgagcatcttt

SEQ ID NO: 13825 - DNA, 201 bp, Homo sapiens
tatgacgtcgcatgcacgcgtacgtaagcttggatcctctagagcggccgcctactactactaaattcgcggccgcgtcgacctcttccgatgtttgtgtcacacaacactgatgtgacttttatatgctttttctcagatctggtttctaagagttttggggggcggggctgtcaccacgtgcagtatctcaagatattc

SEQ ID NO: 13826 - DNA, 349 bp, Homo sapiens
  misc_feature 102, 136, 276, 277: n = A,T,C or G
tttcaagaaggagggagaggttaccttgtcgagagcaaggtaggataaggttttaaaatggtagactcagccgggtgcagtggctcctgcctgtaatcccancactttgggaggctgtggtgggtggatcacctgnagtcaggagttcgagaccagcctggtcaacatggcaaaaccccatctctactaaaaatacaaaaaacgccgggcgtggtggcttgggcctgtagtcccagctacttgggaggctgagacatgagaatcgcttgaacccanngagtggaggttgcagtgagccgacattgcaccactgcactccagcctgggtgacagagtgagactctttctc

SEQ ID NO: 13827 - DNA, 249 bp, Homo sapiens
tggtcctagctactcaggaggctgaagtgggaggatcgctggagtctggaaagttgaggctgcagtgagccatgatcgtgccactgcactctagcctgggtgacagagtgataccctgtctaaaaaagcaagacaaaacaaaaaaaccccacttattttccttgtggccatcttggagattacaattaatatcttaaatgtattttaattaattaattaatttatttatttatttatttattttgagac

SEQ ID NO: 13828 - DNA, 643 bp, Homo sapiens
acagaagggactacagccttgttagatgacttggataaagaactaaacaactacattatgcgatgtagagaatggtatggctggcatttccctgaattaggaaaaattatttcagataatttaacatactgcaagtgtttacagaaagttggcgataggaagaactatgcctctgccaagctttctgagttgctgccagaagaagttgaagcagaagtgaaagcagctgcagagatatcaatgggaacagaggtttcagaagaagatatttgcaatattctgcatctttgcacccaggtgattgaaatctctgaatatcgaacccagctctatgaatatctacaaaatcgaatgatggccattgcacccaatgttacagtcatggttggggaattagttggagcacggcttattgctcatgcaggttctcttttaaatttggccaagcatgcagcttctaccgttcagattcttggagctgaaaaggcacttttcagagccctcaaatctagacgggatacccctaagtatggtctcatttatcatgcttcactcgtgggccagacaagtcccaaacacaaaggaaagatttctcgaatgctggcagccaaaaccgttttggctatccgttatgatgcttttg

SEQ ID NO: 13829 - DNA, 226 bp, Homo sapiens
  misc_feature 113, 123, 138, 194, 197, 203, 224: n = A,T,C or G
ggggtaattgctgacccaagaggaaacactctaggacggggaacgacaattacccttgtcttaaagaagaagcatctgattaccttgaattggatacaattaaaatctcgtcnaaaatattcncagttcataactttnctattatgtatggagcagcagactgaactgtgaggagcccttggggaagaaaagcnccnagaganaagaaaatctgtgtgaactgngt

SEQ ID NO: 13830 - DNA, 702 bp, Homo sapiens
  misc_feature 1, 8, 21, 55, 65, 81, 143, 149, 158, 203, 206, 207, 216,232, 240, 253, 309, 316, 330, 352, 366, 368, 401, 566, 598,601, 607, 616, 631, 648, 658, 670, 699: n = A,T,C or G
nagacagnaggggttattaanaatagctgttatttttaatagctatactaaaacntaaaaatgtntaggtcagggcgtggnggctcatgcatatcatcccaacaccttgggtaggatgaggtgggaggattgcttgaggccangagttngggatcagnctgggccactgacttttcaagctatctttgtctctggcccctctncanngcactcaangtccattgtccttagngctaagtnatggttggggatntttgctgaggatcagacaagggctcttggaggaaatggcggacccagactacattncatgcanctcaccatccttangagggagatggaatcttctgtntactaacacaccananaggtataatacaagggacaaaatgtggcaagtntcaactcttctgccttgacatgcaaaccatcccttctgagctcacttccatgcaccatgcacagtggattccatgaacccacttccatgctaccatttttgtttttgtaatcatttgcaaagagacagaatgatattaagaaagtatcagtggctgggcacaggnggtgacataaacctgtaattccagctactcangangctgangcaggaganaattgcctgaaccanggaggcggaggttgtantgagcaaaancacaccactgcnctccagcctggagacagaggagactctgnccc

SEQ ID NO: 13831 - DNA, 364 bp, Homo sapiens
tccaccgcggtggcggccgctctagactagtggatcccccgggctgcaggaattcggcacgaggctgcacgagctgcaagagaagctgagcccactgggcgaggagatgcgcgaccgcgcgcgcgcccatgtggacgcgctgcgcacgcatctggccccctacagcgacgagctgcgccagcgcttggccgcgcgccttgaggctctcaaggagaacggcggcgccagactggccgagtaccacgccaaggccaccgagcatctgagcacgctcagcgagaaggccaagcccgcgctcgaggacctccgccaaggcctgctgcccgtgctggagagcttcaaggtcagcttcctgagcgctctc

SEQ ID NO: 13832 - DNA, 153 bp, Homo sapiens
acaagtttgtacaaaaaagcagctggtaccggtccggaattcccgggatatcgtcgacccacgcgtccgcccacgcgtccggacccacgcgtccggtgagccgagatcaccccactgcactccagcctgggcgagagagcaagactcagtctc

SEQ ID NO: 13833 - DNA, 542 bp, Homo sapiens
actttgacaacaaattatattttaaatgtttcatatttacttttatatttccatacaatcagaaacagtaaaaaaaatttggagagcacataaaaacatcttaaagttaaaaatataaagccttgtatttaaaaatgcagtcatttaaataatattataagaatctatttgtacataataaacaagtttcaaccagcaagaaattactaatattgactgtggagttttggctgttttaatagttctaactcattattccgtaattcaacacagcactaccaacacagctggcaatgacaagactgggagtatcaaactaggattgttagttcaattaaaatttcagataaacaataatgtacttatactaaaaaattatttgttgtttatctgaaatgaaaatttaactgggtacccaattgtttgtttgtttaatctaaaaaccctgattgaaatttatctaataaaacatcatttaatatctaaaataaaataaatttactataacatctttataactattcaatcaatgattcatcttc

SEQ ID NO: 13834 - DNA, 495 bp, Homo sapiens
ttaggcctatttaggtgacactataggaacagtttgtacaaaaaacaggctggtaccggtccggaattcccgggatatcgtcgacccacgcgtccggtctcgcgctctgttgcccaggctggagtgcaatggtgccatttcggcttgctggaacctccgcctcctgggctcaagcgattctcctgcctcggcctcctgagtggctgggacttcaggtgcacactgccacacccgcataatttttttgtattttagtggacacagggtttcaccgtgttgcccaggctggtcacaaactcctgagctcaagccatccgcccgcctcggcctcccaaagcgctgggataacaggcgtgagcccccgcgcctggcttcttaattgttctaacagcagcgacaacaacaaaaacccagctctgagattccagccccggcgactctaacagtcccaggcccgatccctcacctacaaccgagatgccagccctgactcca

SEQ ID NO: 13835 - DNA, 651 bp, Homo sapiens
aagcttgcggccgctgtgcggaggccgctgaacagctgcagccgccgccgcgcagatccacgctggctccgtgcgccatggtcacccacagcaagtttcccgccgccgggatgagccgccccctggacaccagcctgcgcctcaagaccttcagctccaagagcgagtaccagctggtggtgaacgcagtgcgcaagctgcaggagagcggcttctactggagcgcagtgaccggcggcgaggcgaacctgctgctcagtgccgagcccgccggcacctttctgatccgcgacagctcggaccagcgccacttcttcacgctcagcgtcaagacccagtctgggaccaagaacctgcgcatccagtgtgaggggggcagcttctctctgcagagcgatccccggagcacgcagcccgtgccccgcttcgactgcgtgctcaagctggtgcaccactacatgccgccccctggagccccctccttcccctcgccacctactgaaccctcctccgaggtgcccgagcagccgtctgcccagccactccctgggagtccccccagaagagcctattacatctactccgggggcgagaagatccccctggtgttgagccggcccctctcctccaacgtggccactcttcagcatc

SEQ ID NO: 13836 - DNA, 506 bp, Homo sapiens
tatgacgtcgcatgcacgcgtacgtaagcttggatcctctagagcggccgcctactactactaaattcgcggccgcgtcgacgccgaccaagagccagggagccagatggtggaggccagcctctccgtacggcacccagagtacaacagacccttgctcgctaacgacctcatgctcatcaagttggacgaatccgtgtccgagtctgacaccatccggagcatcagcattgcttcgcagtgccctaccgcggggaactcttgcctcgtttctggctggggtctgctggcgaacggcagaatgcctaccgtgctgcagtgcgtgaacgtgtcggtggtgtctgaggaggtctgcagtaagctctatgacccgctgtaccaccccagcatgttctgcgccggcggagggcaagaccagaaggactcctgcaacggtgactctggggggcccctgatctgcaacgggtacttgcagggccttgtgtctttcggaaaagccccgtgtg

SEQ ID NO: 13837 - DNA, 731 bp, Homo sapiens
  misc_feature 1, 158, 590, 698: n = A,T,C or G
nacgacagtagggggagcggcaacatggcgtccaggtctaagcggcgtgccgtggaaagtggggttccgcagccgccggatcccccagtccagcgcgacgaggaagaggaaaaagaagtcgaaaatgaggatgaagacgatgatgacagtgacaaggnaaaaggatgaagaggacgaggtcattgacgaggaagtgaatattgaatttgaagcttattccctatcagataatgattatgacggaattaagaaattactgcagcagctttttctaaaggctcctgtgaacactgcagaactaacagatctcttaattcaacagaaccatattgggagtgtgattaagcaaacggatgtttcagaagacagcaatgatgatatggatgaagatgaggtttttggtttcataagccttttaaatttaactgaaagaaagggtacccagtgtgttgaacaaattcaagagttggttctacgcttctgtgagaagaactgtgaaaagagcatggttgaacagctggacaagtttttaaatgacaccaccaagcctgtgggccttctcctaagtgaaagattcattaatgtccctncacagatcgctctgcccatgtaccagcagcttcagaaagaactggcgggggcacacagaaccaataagcctgtgggaagtgctactttaccttctgattagtaagacntttggggaagcaggaaaaacattccaaaagaat

SEQ ID NO: 13838 - DNA, 825 bp, Homo sapiens
  misc_feature 13, 18, 19, 30, 43, 58, 59, 61, 62, 69, 458, 669, 731, 758,759, 760, 763, 791, 800, 808: n = A,T,C or G
ttttgaccatacnatccnncttgcttgttncttttggccgcancggcctacggcgcgnnannagacagnaggggtctgtgtcagtctataacttgcctcctctgggcctgttaaagcatgaagactgcatgacacaagagaaatgcaagccctacggttcctttctcagcagcgaattcacttgagaggatgctcttgactcattctctctgctctttcctgctcagatttctgataaaaatagagagcataggggaacagataatgaaataggaaacccactcgtgggttccacagatacctaccgaaggcctactgtgtgctagaattgtagctcaggagttctcagtgtagctgctcactgaagttaccatggcaggtttcaactggcagaatccaggctccgtcccgcccagagattctgatgaaattggtttagggtgtggctcgggcctcangaattcagaaagcttcccaggtgcttccaatgtgcagccagggttagggacctctaccctagacacaaagtattggacagatagacctggtgccagagatggccatgagctgtaagctaggacgtgccccacctgagctctgcactagctagttcaaacaggcgctttaaaggcagtgtgaaaggggacagcctgttctgccaggtctcanaatgtatattattaagtgccattaaaagggacctgaacaaaatgggtgtcttgtaggcttanggaggaaaataaaattacttggaaccnnnctntgtctgaagggaaataaaatgtttcatnccctggttntggttctntaaacaagggataaata

SEQ ID NO: 13839 - DNA, 268 bp, Homo sapiens
atagtttaaatctaaaaaattatgtgagaagaaccctttgttatttgaaggggatgtttgaagattttgtaaccgtgccttttaggtagtcctaaatttctaattgtagttaaaaacatgccattttcatttctaacattttaagtatatggtttagaagtggtaagtatagttctattttttttgcaataggttttagataatttttgtcttacaaaattaaaagtgaatactcattaattctgaaacaagttagttagcttgcttt

SEQ ID NO: 13840 - DNA, 360 bp, Homo sapiens
tttgaggttttttcactgcaccagtagtgagttcagactgaggccctgagtacagtagttcccctttatctgtggtttctctttccagagtaccagttgccattggtcagccacagtctgaaaatgttacattactactcatgccctttggggctatgattaagtaaaataagttacttgtacaaaaacagtgtgatactgtgacagtagatctgatcatcaagatggccactaagggactagccggcaggtagaatagatggacaaagggaatgattcgtatcctgtgttgcaggacagcgtgagatttcatcatgctactcagaacacatgcaatttaaaacttacaaactgcttttt

SEQ ID NO: 13841 - DNA, 485 bp, Homo sapiens; identical to SEQ ID NO: 10746

SEQ ID NO: 13842 - DNA, 308 bp, Homo sapiens
cctttctttctttctttctttctttctttctttctttctcccttcctttctccctttctttcccttcctttcctttcctttccttttttgggaaaacagggctctccaaaaaaaataataaataaaattattggcccctaaggaaacagggacctcttaaggtaaaaatccccttttaaaaatgtccatagcccctcccttcttcctttcttttccttcctttctttcttccttccttccttccttcctttcttcctccctcccttcctccctttctttcctcccttcctttctttcttttttttttt

SEQ ID NO: 13843 - DNA, 515 bp, Homo sapiens
agtggatcccccgggctgcaggttttttttatgggtgaaaagatatatatatatatatattcagaattaggcagctggactcagtttatatgatcccaattttgttggcaacatccaaagcatcgtaatcaggagccagtcgaacatatgccttcttctctccatcaggccgaatcagggtgttgaccttggccacatcaatgtcatacagcttcttcacagcctgtttaatctggtgcttgttggctttaacatccacaatgaacacaagtgtgttgttgtcttctatcttcttcatggcagactcagtggtcagcggaaacttgatgatagcatagtggtcaagcttgtttctcctgggagcgctcttccgaggatatttgggctgtctccggagtcgcagtgtcttcggccgccggaaggtgggtgacgtgcggatcttcttctttttgtggctgtggacacctttcaacactgccttcttggcctttaaagccttcgctttggcttcagct

SEQ ID NO: 13844 - DNA, 90 bp, Homo sapiens
gtgggggcgccgggccgtcacgatgagcgccctgggcagcccggaccggacctactactttctgctcaagttcctgctggagggcgacat

SEQ ID NO: 13845 - DNA, 649 bp, Homo sapiens
  misc_feature 53: n = A,T,C or G
acaagctacttgttctttttgcaggatcccatcgattcgtgttcctgtgccangaaagaaagttaaaatacttgcttaagaaagggaggggggtgggaggggtgtagggagagggaagggagggaaacagttttgtgggaaatattcatatatattttcttctccctttttccatttttaggccatgttttaaactcattttagtgcatgtatatgaagggctgggcagaaaatgaaaaagcaatacattccttgatgcatttgcatgaaggttgttcaactttgtttgaggtagttgtccgtttgagtcatgggcaaatgaaggactttggtcattttggacacttaagtaatgtttggtgtctgtttcttaggagtgactgggggagggaagattattttagctatttatttgtaatattttaaccctttatctgtttgtttttatacagtgtttcgttctaaatctatgaggtttagggttcaaaatgatggaaggccgaagagcaaggcttatatggtggtagggagcttatagcttgtgctaatactgtagcatcaagcccaagcaaattagtcagagcccgcctttagagttaaatataatagaaaaaccaaaatgatatttttattttaggagggtttaaat

SEQ ID NO: 13846 - DNA, 502 bp, Homo sapiens
gcggccggggttttttttttatttttttccccctataactgtttattagaatgggaatatattccaaatcaataactaaaaaaaaatcaaattacagagcatgcataaaatacaaagtagcaatttacaaatagataatattatcttcataactaatacactaaaataataaaatggctatagaagcaaacccaatatgactgactacagcaatgccttccgtgtgccccacacatcatgagcaccgcaagagacaaaagattaactatgaaatatagtaatctaagcaagcccacacatacatatttttggggatttcccaccatcctgaatagtatcactgcagttgacacaacttccaggaaactgcagagtaagtgcttaatattatccacgagaaagcaaaactaaatattagtgtgcacatttctgaatgagaaactaattgcttcattgatttcaacaatgtagtggaagaaaactatttcagatctctacaatg

SEQ ID NO: 13847 - DNA, 612 bp, Homo sapiens
  misc_feature 203: n = A,T,C or G
tatttagtgacactatagaaggtacgcctgcaggtaccggtccggaattcccgggtcgacccacgcgttcggcgattacaggcgtgagctactgcacccggcaaccctatgtttttttctaagaatatagtgtcccttgccccctgctacaagccttacccagtgttacataatttattgtaattaaattgtttattaatgtnacattcttgctgtagaagaaaacgtgtccttttgggctcagtacagtatatgtttcttaagtaagagggatcatattaaaccagctacttaatgtgaagcagatagccagtgttctccatgtacaatcttagggagggtaatttttgttttggctgtgtaattatggtttgaggcagcccattaatcgcatatttcagctgtcaaatagaaatttggcccagaaaggaatacactttggctttacaaaactgcttattttcaaatttttaaatggggacaaaaacgaatatgctatattatatacttttatttatataatttttttttcagcaactttttctcttttgaaaatgcaagagcctgaaaaacattgtgaatatacttgtaacattgcaaagctatttcacc

SEQ ID NO: 13848 - DNA, 609 bp, Homo sapiens
tttgtacaaaaaagcggctggtaccggtccggaattcccgggatatcgtcgacccacgcgtccgaggccctatgcctcaccctgagaacgcagtgagcatgaggtggacctgtttgctgggaaccccaggtcacccccttttcttcctactctgtgcctggagcatcatgtccacccctgcagatccttggaaaagaaaatgtttatgttgcagggtattgcatggtcacgagtgagggcaggcccctggggacacatctgcccacagctgcacaggccagggcgcaggcacatctgttggttctcaggcctcagataaaaccatctccgcatcatatggccagtgaccgctttctcccttcaagaaaattctgtggctgtgcagtactttgaagttttaattattaacctgctttaattaaagcagtttcctttcttataaagtggaatcaccaaatcttatcacacagagcacagtcctgtagttacccagcccgctccagcagtgcgggagattgtaaggaagcggtggcggctggtgaagcaagtctcacatgtcggcgttcttggccaatggatacaaagataaagaaaatgttgcctttttct

SEQ ID NO: 13849 - DNA, 429 bp, Homo sapiens
  misc_feature 24, 348, 376, 387, 393, 399, 410: n = A,T,C or G
aagcggaaaggggaggcatgggcntgaacgagaagcagatcctggagaaagtgaacaagtaggtttgtagtgagcttggcctacggctagtgagaccaaggaccgcgctgtcctggtgctgacactgatgaacgggggcgacctcaagttccacatctaccacatgggccaggctggcttccccgaagcgcgggccgtcttctacgccgccgagatctgctgtggcctggaggacctgcaccgggagcgcatcgtgtacagggacctgaagcccgagaacatcttgctggatgaccacggccacatccgcatctctgacctgggactagctgtgcatgtgcccgaggncagaccatcaaagggcgtgtgggcaccntgggttacatngctccngagttngtgaagaattnaacggtacacttcagccct

SEQ ID NO: 13850 - DNA, 465 bp, Homo sapiens
ccagacttggcacgaggggcagttcacggtcatccagctggtgggcatgttgcggggcattgctgccggcatgaagtacctgtccgagatgaactatgtgcaccgcgacctggctgctcgcaacatccttgtcaacagcaacctggtctgcaaagtctcagactttggcctctcccgcttcctggaggatgacccctccgatcctacctacaccagttccctgggcgggaagatccccatccgctggactgccccagaggccatagcctatcggaagttcacttctgctagtgatgtctggagctacggaattgtcatgtgggaggtcatgagctatggagagcgaccctactgggacatgagcaaccaggatgtcatcaatgccgtggagcaggattaccggctgccaccacccatggactgtcccacagcactgcaccagctcatgctggactgctgggtgcg

SEQ ID NO: 13851 - DNA, 616 bp, Homo sapiens
acagaagggatgttaaagaaagacatggcggagtgaatatgattccctgctgccagatgtgtatgaatggccagaatctgcatcaagccctcctgtgataacagaatagaagcactcccctgataaatactttctgtgctccagggaaccccttttttcagacaagaagagataatgtcttcagttttatggtgttttctgtgttttgttctccctgaccactttggttgatgtattttttccatgcgtctccacatctgttggggtagacgtgttgattgattgcattgcccaccagcaccctacaatcagatagttgtgatgctttaattctaacatacagcccgtaccacatccaggagatgtaaaaagtgtgtttgtgaatgtcttcacttgtactctaattcagacttgccaaagtatttgctatttactattatgggtaatactcttctctggcctagttcttacagagctactaaaatagaaatttacttttatggatagaagtacagaattttgagaagaaactaaattgtcaccaaattttaaggaaaaattgtcattatctaaaaatgttcttatatatctgcttcatcttaccttcatactctga

SEQ ID NO: 13852 - DNA, 754 bp, Homo sapiens
  misc_feature 546, 556, 661, 675, 677, 717, 747, 752: n = A,T,C or G
aaaaccgatggggaacctggcccccaaggctggtcccccagggaacgggcagcccttcaagaggagtttagtgacgtcctcatctacctggtggcattagcagcccgctgccgtgtggatctgccgctagcagtgctctccaaaatggacatcaaccggcgacgctacccagcccatctggcccgcagctcttcccgcaagtatacagaattgccccatggggccatctctgaagaccaggctgtggggcctgcggacattccctgtgactccacaggccagacctcaacctagaaagatggccacaggacttgcaactcagggtggtgtctgaagagcagagagtggcctggccctggagcctttttctagtcttttcagaatagatcatgggcctgaggcctccacttcttgaggtctgaggcccagcagcctctagaaggtagcctcctggtgtttgttctcccagtaaaatggttttgggcgataacttctagattattcctggatggccagggaggctctctgtctcagcaggtgatgacnggggtaccangggtgcctctgagaccattctcgtgtttccctgttgtaccttttgcctgcaggcagaagatctggttctagcaattccagtaggatgtatgtagttcttcccctntaaaatgaagctgnanatcaaatgtgagcagctgctggttaatgcacttgaccttnaactaatactactaatatcgtctgcttatntctgntt

SEQ ID NO: 13853 - DNA, 304 bp, Homo sapiens
tccaccgcggtggcggccgctctagaactagtggatcccccgggctgcaggaattcggcacgagctgttctaggtgcctgggatacagaagtgaaaataaattcttgccccatagagttaaatctgcaatcttagaatgttatcagatcatgttgtatgttcaaacttaaaatagattgatgggtaaataatttatttccttattagtgaggttgaacatttctccatatgtttgtttagtacatttctaaaataagctttgatagcctctaaaataaagaaaatagggagaccctttctttac

SEQ ID NO: 13854 - DNA, 389 bp, Homo sapiens
  misc_feature 64: n = A,T,C or G
cgagcagctccgccggacgactcgctctgttgtccatcccaagtaccaccagggctcaggcccnatcctgccaaggcgaacggatgagcacgatctcatgttgctaaagctggccaggcccgtagtgccggggccccgcgtccgggccctgcagcttccctaccgctgtgctcagcccggagaccagtgccaggttgctggctggggcaccacggccgcccggagagtgaagtacaacaagggcctgacctgctccagcatcactatcctgagccctaaagagtgtgaggtcttctaccctgggcgtggtcaccaacaacatgatattgtgctggactggaccggggccagggaccctttgccagagtgactcttggaggccccctggg

SEQ ID NO: 13855 - DNA, 605 bp, Homo sapiens
  misc_feature 529, 541: n = A,T,C or G
ttgtcgcagctgttttaattcaatcccacgcccctgtccagcaggaaaccccttatagaaaacccaaatcctcatcttggagtttctccttcagccagggcagcacttgaaagaggttgatgtgaaagtctcgggcgtgagcaggtacctgcttttgccgcttctggtttttgcagacatccactactccccagctgattacaccaacttgaatgaaacgacttctcttgtgaactatcaaggggccgccagaatcacctctgcaagtattggggtcagcatagggactcactcctccagtacaaaggaaccgaggggtgaccacctctgagatgtccttgactttgtcatagcctggggcatattgagcatctctctcacagctgcctttcttatccccattcttgatgtagacctccttccgagtcagctttttctcctcctcagacacaaacagagctttgatatcctgtgcagggagcagctctttccttttgttgctggcaagtggtagttggaggagcctcanagcctcgagtgnttccctggtgccaggggagacaatggccctgatagctgccatatttcagcttattcttggagct

SEQ ID NO: 13856 - DNA, 452 bp, Homo sapiens
  misc_feature 47, 49, 52: n = A,T,C or G
ttctcagcattttcaaagcactttattgagttcctgcgccatcctgngngangctggccgcactgggggaatgggacacaatcttgccttccatgccccagccactctctcactgcggaatcaccaaggagggaaagatgagtccctgagcaatcaggaaacggtgtgctcccggatccaggccaggtagtaggccacatcggtgtagacgcctggcttgttgcggtcaccacagcccgatccccagctgatgatgccttgcagggtgagccggcgctctgcaagcttggtcctcacacaccagcgggcctccggaatcaccctggcacgcatcggtgccgccctcgaggaaccctgcgcagagcatgccggggaggatggaggatccgtgcacgtccggggctgagcagcgctccagggagaggaacggtacctgcgccttccctcgtgcc

SEQ ID NO: 13857 - DNA, 487 bp, Homo sapiens
tccaccgcggtggcggccgctctagaactagtggatcccccgggctgcaggaattcggcacgagggaagggtacagtgattaatagcccaaattccagagttgaactgcctccatctggatccttactttactctgcatgtagtaggcaatcttaggtcaagaaagatttggaaacatgacgagggtctattaccgagaagctatgggtgcatttattgtcttcgatgtcaccaggccagccacatttgaagcagtggcaaagtggaaaaatgatttggactccaagttaagtctccctaatggcaaaccggtttcagtggttttgttggccaacaaatgtgaccaggggaaggatgtgctcatgaacaatggcctcaagatggaccacttctgcaaggagcacggtttcgtatgatggtttgaaacatcagcaaaggaaaatataaacattgatgaagcctccagatgcctggtgaaacacatact

SEQ ID NO: 13858 - DNA, 439 bp, Homo sapiens
  misc_feature 47, 48: n = A,T,C or G
ttgaagttacagatctgggacacgggcggtcaggagcggttccgcanntggtgtccacgttctacaagggctccgatggctgcatcctagcttttgatgtcaccgacctggagtcttttgaagccctggatatctggcggggtgatgtcctggccaagattgtccccatggagcagtcctaccccatggtgttgttggggaacaagatcgatctggcagaccggaagtaccagagcatcttagaaaatcacctcacagaatccatcaagctctcgccagaccagtcaaggagcagatgctgctgacctccagacgcctgctctggaagcccagaaacagagcctgccccgagcctggtcaccccaggcttgagaacaggtgaccatccccctccagccccactgcctgcccaagcacagtgcagggggcctaagctctg

SEQ ID NO: 13859 - DNA, 340 bp, Homo sapiens
  misc_feature 207: n = A,T,C or G
tccaccgcggtggcggccgctctagaactagtggatcccccgggctgcaggattcggcacgaggccggagcttcctacaatccatcctttgaagaccaccagaccctgctctcagcggcccacgaggtggagttgcagcggcagaaggaggcggagaagctggagcggcagctggccctgcccgccacggagcaggccgccacccangagtccacattccaggagctgtgcgaggggctgctggaggagtcggatggtgagggggagccaggccagggcgaggggccggaggctggggatgccgaggtctgtcccacgcccgcccgcctggccaccacag

SEQ ID NO: 13860 - DNA, 800 bp, Homo sapiens
  misc_feature 2, 3, 8, 12, 16, 24, 25, 26, 42, 44, 49, 59, 61, 88, 95,122, 123, 159, 238, 616, 751: n = A,T,C or G
cnncgctnagcnttgncttgtctnnnttggccgaagcggccntncggcntgcgagtacntngaccagaagggggattcggaggggaangctgacntccacaccaagtcgagacttccagggnntgtggccggggagcaagtcacatgctgtagctttcntgagccacaggcatcagtcaggcagatgtttgtcgactggaatggcgccaaatcttaaaggcagaccacgcaaaaaganaccatgcccacaaagaagagattcattcagtggtgttaaggattccaacaacaattccgatggcaaagccgtcgccaaggtgaaatgtgaggccaggtcagccttgaccaagccgaagaataaccataactgtaaaaaagtctcaaatgaagaaaaaccaaaggttgccattggtgaagagtgcagggcagatgaacaagccttcttggtggcactttataaatacatgaaagaaaggaaaacgccgatagaacgaataccctattttaggttttaaacagattaacctttggactatgtttcaagctgctcaaaaactgggaggatatgaaacaataacagcccgccgtcagtggaaacatatttatgatgaattangcggtaatcctgggagcaccagcgctgcacttgtacccgcagacattatgaaagattaatcctacctatgaaagatttattaaaggagaagaaataagcccctgcctccatcaacctcggaacaggaaacagttncaggaaatgagacaaacaaagttctggaccaaccctcaacatgaatacc

SEQ ID NO: 13861 - DNA, 164 bp, Homo sapiens
  misc_feature 3, 4, 10, 20, 36, 44, 54, 70, 74, 75, 84, 85, 88, 95, 114,129, 138, 143, 154, 156, 157: n = A,T,C or G
gcnnataacnacacacaggngcacctgtgagaaaangccacatnggtgtgcctntgagattacaacacanaggnncacttgtgnnaanacaacanaaagggctttctctttcanattaccaaatcttgngtttttttnatagngtactacatgngnnctctgtc

SEQ ID NO: 13862 - DNA, 453 bp, Homo sapiens
  misc_feature 301: n = A,T,C or G
cggcacgaggctaggttattttacaattttttcatggtcttgcatggacaggttgcatggacagcacttatttcttcttctattatataatttatttccttttgtatcaaaggaggaagaagccagacgacagtcaggagctcagtatggctcttttccagtggctttcctgggggaatgcctggtaattttcccggaggaatgcctggaatgggagggggcatgcctggaatggctggaatgcctggactcaatgaaattcttagtgatccagaggttcttgcagccatgcaggatccanaagttatggtggctttccaggatgtggctcaaaacccagcaaatatgtcaaaataccagagcaacccaaaggttatgaatctcatcagtaaattgtcagccaaatttggaggtcaagcgtaatgtccttctgataaataaagcccttgctga

SEQ ID NO: 13863 - DNA, 495 bp, Homo sapiens
cggcacgaggggtgtaggtaaatcgagtattgtgtggcggtttgtggaagacgttttgatccaaacatcaacccaacaataggggcatcttttatgaccaagactgtccagtaccaaaatgagctacataaattcctaatctgggatacagctggacaagaacgatttcgtgccttaacaccaatgtactatcgagggtcggctgcagctataatcgtttatgatatcacaaaagaagagacattttcaacattaaagaattgggtgaaagagcttcgacagcatggcccacctaatattgtagttgccattgcaggaaataaatgtgatcttatcgatgtaagagaagtcatggagagagatgcaaaggactacgccgactctattcatgcaatttttgtagagaccagcgcaaaaaacgcgataaacataaatgaactctttatagaaattagtcgaagaattccatccactgacgccaacctgccatctggc

SEQ ID NO: 13864 - DNA, 475 bp, Homo sapiens
  misc_feature 377, 385, 457, 463: n = A,T,C or G
agtacccctgctcagtatgcgctgatggagaaagacgccctccaggtggcccaggagatgaaggctgagtactgggcactctcatctctcactggtgagaatgtccgagaattcttcttccgtgtggcagcactgacctttgaggccaatgtgctggctgagctggagaaatcgggggctcgacgcattggggatgttgtccgcatcaacagtgatgacagcaacctctacctaactgccagcaagaagaagcccacatgttgcccatgaggctggagggagactgttcagagactgcccagcccttagggaacttgtggccacccttcatttccttccagagcttgaacccctgggacattttgcactggactttnattccagnaccaaagagctggcctcttgggtgggcagttatttcccacagaggggttagctggggatcatgttagttcanttcctngcccccaggaac

SEQ ID NO: 13865 - DNA, 577 bp, Homo sapiens
caagctacttgttctttttgcaggatcccatcgattcgtgagggtaggaccctcccagccaggtgccggatataatctcgtggtgcgccgtttttttaagccggtccgaaaagcgcaatattcgggtgggagtgacctgattttccaggtgcgtccgtcacccctttctttgactcggaaagggaactccctgaccccttgtgcttcccaagtgaggcaatgcctcgccctgcttcggctcgcgcacggtgcgcgcacccactggcctgcgcccactgtctggcactcgctagtgagatgaacccggtacctcagatggaaatgcagaaatcacccgtcttctgtgtcgctcacgctgggagctgtagaccggagctgttcctattcggacatcttggctcctccccaagagttctggagtctgagaagtcaaggatcggggtgctggcctattcagttcctggtaagggctgtcttcctggcttgcagttgaactacttcttgctgtgtcttcacaagcatgcccccatcctgtgccgataagaactccagaccccaaactcagctcatacacaca

SEQ ID NO: 13866 - DNA, 212 bp, Homo sapiens
aaacacgatgggtgcatcacaaataggtgtaaacagtacacttttgtaatgtgtagacaccagtttctgcaacccccatgccacgcaaagtttcagggaaagtctttgaaagtacaatccggaaaactcagcaattcttaaaaaaaaatggctttccgctgttataagcctccttcctaaaactcagggtccgcagcagaataccctgaccc

SEQ ID NO: 13867 - DNA, 554 bp, Homo sapiens
tacgcctgcaggtaccggtccggaattcccgggtcgacccacgcgtacgggctcaatgaaggtaacaaaggagttaatttatccaaaagatggaagatgttacatgctaaaggaaaaaacataacccactacattagggctttacataatattatgagaatgtgctgaagacacttaaagcctgcactcccttgcaagctgagcaatgacaacattgtccaaatcttccaacagcaacaccccagtaagccaacagctacaagtggaacaagacagagatttctgagccctctattgaactaactgccatctccaggttaggtttgcagatttctatatttaaaaagtagaaagcatcagcagttgggggttgaattcttggtgtgtgtgcagttgcgtaaaaggactatttttatttctcgctgccgtatgaagaagctttgatcttggacgacttgctcaagggcccatgataatatattgatcacttctgactgttttcacccagactcgtttccataagctcagtctgtcaacaagaaatacttcatata

SEQ ID NO: 13868 - DNA, 431 bp, Homo sapiens
tatgacgtcgcatgcacgcgtacgtaagcttggatcctctagagcggccgcctactactactagcctactactactaaattcgcggccgcgtcgaccaaggaactggatggcgcgaccatctgcatccaggccggtaccaccaccgagctgaatgtgtccgactacttccgcgccaatggcctgaagtacaccccgatcaccttcgacacctccgacgaaagcgccaagtcgctggaatccggtcgttgcgacgtactgacctcggacaaatcccagctgttcgcccagcgcagcaagctggcctcgccgaaggactacgtggttctgcctgaaaccatctccaaggagcctctgggcccagtggtgcgtaacggcgacgaagagtggaccaagatcgttcgttgggtcggctatgcgctgctcaacaccg

SEQ ID NO: 13869 - DNA, 687 bp, Homo sapiens
  misc_feature 587: n = A,T,C or G
gaaaaaacaataaacacctttattacataggtgaagacaaaacaaggatttatttgcctttgcgggccttgatattcctaagatagaactccaactctttgccctctagcacatagccatctgctcggccacactgtcccggccttgaagcgatgcacgcaagaagcttgccctgctggaactgctcctccaggagactgctgattttggcattctttttcctttcatcatatttcttctgaatttttttagatcgttttttgtttaaaatctcttcttcctcaggagtcagcttggctcccttcttgcggcccaggggcagcgcatagtgggactcgtatcactgtcggtacggtgtgctgtcgatgagcacgatgcaattcttcaccatggtcttggtacgaagcatctcgttattagatgcattgtagacaacatcgaggatccttgttttacgagtacaacatgctgatgcccagtgagaaattcgccacgtgccagctcaggccacggtatttcttgttatctcctcgcacacgaactgtgtgtgatggcggcgggagcaattcttggtgttgggcactggnggtcccaaactcatacttgcggcctctggtggttagggcttacgcttgcccccgtgtttagggcgctgttgcatgttgtcccgagagatgcccatcgctc

SEQ ID NO: 13870 - DNA, 700 bp, Homo sapiens
  misc_feature 551, 578, 602, 611, 627, 641, 643, 647, 648, 655, 658, 678,691, 692, 693, 694, 695, 696: n = A,T,C or G
cagcatcggcatcaaccaccacctggctagaaacacaggccccactcccaaacgagttgaatcaggatctgcatttgaataaaatcccaacatgctttataccagacaggagttgacagtagtctaatagtagatgtagggatgtgtatgtatgaataagaaatggagttgctccactttcctcatgtttcctcttttatttcccttgcctactagaagattacatttgggagaagccacttcccctctctggatctctgtttcactacctatgaggagattaaactagactgtctataagagtccttctctgagttgttctctgatcttggattctaaaggctggcacttgtatgaaaccagctgtcctgctttctggaaaaagtccagcgccattgttaagcaggaaaatttctcctgtgtggttctgccaaaacaaaagctcagactattattcagatctggctggcaagagagatttgtcaactacatgtttattgaatgatgaaacagctgcacacattcctgcacagaaaacacacattgtctangtgacaaagagtaatgtggacactcanggccatcttctgacccttgctagnttttttggnagttggttggtttggntctttggatttttngntggnntggggcnggnttgaaaaggggctattttgncctccggtggagnnnnnnctga

SEQ ID NO: 13871 - DNA, 579 bp, Homo sapiens
  misc_feature 24, 29, 58, 69, 98, 134, 144, 180, 185, 188, 192, 194, 201,243, 253, 270, 290, 310, 317, 333, 372, 394, 399, 409, 421,450, 454, 463, 470, 481, 494, 497, 509, 511, 537, 548, 555,564, 567, 568, 571, 572, 576: n = A,T,C or G
aggattttattctttttttttttngaaanggagcctcactcttgcccaggctggaagngcaggggtgcnatcttggctcactgcaacctctgcctccngggttcaagcagttctcctgcctcagcctcccaagnagctgggatnacaggcgtccgccaccatgcccagccaatttttgtnctttnagnaaananggggttncaccatgttggccaggctggtcttgaactcctgacctcaggngatccactcncctcggcctcccaaagngctgggattataggcatgcnccaccatgcccggccggctnatgattnaaaacatgaattgttnatttctggaattttccacataatatttttggaccaaggntgcctcaggtaacaaactacanaaagngaaattgcanataaaggggatnactgctcctctgctctaaaattggggttngggngatcaaaancaggtanccaatgggaanagcacttctgagnganaactaaagcagntngggggccttttcacattctccaatgncaaaatatttnccacttncattttctnttnnccnnattngcc

SEQ ID NO: 13872 - DNA, 190 bp, Homo sapiens
tccaccgcggtggcggccgctctagaactagtggatcccccgggctgcaggaattcggcacgaggggagacaaattggactcgttcattaaaccacctgagtgcagtagtgatgtcaaccttgagctccggcagcggaacagaggggacctgacagcggactcggtccaaaggggttcccgccatggcct

SEQ ID NO: 13873 - DNA, 504 bp, Homo sapiens
tccaccgcggtggcggccgctctagactagtggatcccccgggctgcaggaattcggcacgagcagcacagtccccgaaaagaagacaccgaagagccctgtaggggtgcagcccatactgaatgaacacaccttctgtgctggcatgtctaagtaccaagaagacacctgctatggcgatgcgggcagtgcctttgccgttcacgacctggaggaggacacctggtatgcgactgggatcttaagctttgataagagctgtgctgtggctgagtatggtgtgtatgtgaaggtgacttccatccaggactgggttcagaagaccatagctgaaaactaatgcaaggctggccggaagcccttgcctgaaagcaagatttcagcctggaagaaggcaaagtggacgggagtggacaggagtggatgcgataagatgtggtttgaagctgatgggtgccagccctgcattgctgagtcaatcaataaagagctttcttttgaccc

SEQ ID NO: 13874 - DNA, 572 bp, Homo sapiens
taggcctatttaggtgacactatagaacaagtttgtacaaaaaagcggctggtaccggtccggaattcccgggatatcgtcgacccacgcgtccgtgttctttgaagctgatggccctaaacagatgaagtgctccttccaggacctggacctctgccctctggatggcggcatccagctacgaatctccgaccaccactacagcaagggcttcaggcaggccgcgtcagttgttgtggccatggacaagctgaggaagatgctggttccctgcccacagaccttccaggagaatgacctgagcaccttctttcccttcatctttgaagaagaacctatcttctttgacacatgggataacgaggcttatgtgcacgatgcacctgtacgatcactgaactgcacgctccgggactcacagcaaaaaagcttggtgatgtctggtccatatgaactgaaagctctccacctccagggacaggatatggagcaacaagtggtgttctccatgtcctttgtacaaggagaagaaagtaatgacaaaatacctgtggccttgggcctcaaggaaa

SEQ ID NO: 13875 - DNA, 771 bp, Homo sapiens
  misc_feature 251, 533, 544, 558, 576, 629, 638, 677: n = A,T,C or G
gcatttttagtagagacgggtttcaccgtgttagccaggatggtctcgatctcctgacctcgtgatccacccgcctcagcctcccaaagtgctgggattacaggcgtgagccaccgcgcctggcctgctcttttaaataaacatttgccttgcaactttctattttgtttaaaatgctaccattttttcgtaagataagagatatgtttcaacctaatttccaaattactttgtgaattccatgaagattntctatacttgatacttaggaggttaaaaaatgcttttaaagtctcattaagtcttaagtaaatggaaattatagaataattttcctagatttcaatgtcaattctattttcttctgttatttctaagcagactgacatgattgattcttaaaagaaaacctgatttgagcaatctattgagcaaaacatttgtaaataaatagtgcccaattaaatcagacttattttaaaaaatatatgtcctgtactgcattgttttcattaagttataaccacaagaanatagtacccanatgttcaaacttcnttagctgacagggccttnttgtgtgaaacatatttattacacatacatcacactctatgcatgatctactntgctcttgnaggcaggtctctgtcttatccactctgacactcagcacnctattgagtgccacagcgccatatgggtgcttcatatcagaactgacattttcagacactactagatggttacacccagtggatggccatcaga

SEQ ID NO: 13876 - DNA, 688 bp, Homo sapiens
  misc_feature 410, 553: n = A,T,C or G
gctgacacccggcactttattagtggggaaactcgccttggtctggcagagactgggatcaacaggaccagcacccatctcgaggtggtattttctgtaagatcaggtgttcctccctcgtaggtttagaggaaacaccctcatagatgaaaacccccccgagacagcagcactgcaactgccaagcagccggggtaggaggggcgccctaggcacagctgggcccttgagacagcagggcttcgatgtcaggctcgatgtcaatggtctggaagcggcggctgtacctgcgtaggggcacaccgtcagggcccaccaggaacttctcaaagttccaggcaacatcgttgcgacacaccggagaccaggtgatgagcttggggtcggtcataagcgcggtggcgtcgtcnctgggagctggcagggcctcccgcaggaaggcgaagagagggtgcgcccccgcaccgttcacctcgcacttttcgaagagcatgaagttgggctcgaacccaccaccaggcccgacgtacttgaaggaattcagaatctcttngttctttgcgttctcctgatgcccaaactggttgcacgggaagccgagcaccacccagccccccgggtccgaaggcgccgctgaaactcgttcattatgggtgtagtcccgggacccggggtgcctaaaagggac

SEQ ID NO: 13877 - DNA, 76 bp, Homo sapiens
aagttttttttaccaccatatttttctactctgtaaggaagtatatctttatggggaaaagagaatttggggtgtt

SEQ ID NO: 13878 - DNA, 467 bp, Homo sapiens
  misc_feature 369, 377, 405, 412, 465: n = A,T,C or G
actcaggcgtgggcaagtcatgcctgctcctgcggtttgctgatgacacgtacacagagagctacatcagcaccatcggggtggacttcaagatccgaaccatcgagctggatggcaaaactatcaaacttcagatctgggacacagcgggccaggaacggttccggaccatcacttccagctactaccggggggctcatggcatcatcgtggtgtatgacgtcactgaccagggaatcctacgccaacgtgaagcagtggctgcaggagattgaccgctatgccagcgagaacgtcaataagctcctgggtggggcaacaaggagcgaccttcaccaccaaggaaggtggttgggacaacaccacagnccaagggntttttgcagattcttttggggcttcccnttttttnggaggacgaggcgccaagatttgccaccattttttcgaggcaggcttttcttnga

SEQ ID NO: 13879 - DNA, 630 bp, Homo sapiens
tcctgtggctcctgctgggccttcggggctgtggaagccatctctgaccggatctgcatccacaccaatgcgcacgtcagcgtggaggtgtcggcggaggacctgctcacatgctgtggcagcatgtgtggggacggctgtaatggtggctatcctgctgaagcttggaacttctggacaagaaaaggcctggtttctggtggcctctatgaatcccatgtagggtgcagaccgtactccatccctccctgtgagcaccacgtcaacggctcccggcccccatgcacgggggagggagatacccccaagtgtagcaagatctgtgagcctggctacagcccgacctacaaacaggacaagcactacggatacaattcctacagcgtctccaatagcgagaaggacatcatggccgagatctacaaaaacggccccgtggagggagctttctctgtgtattcggacttcctgctctacaagtcaggagtgtaccaacacgtcaccggagagatgatgggtggccatgccatccgcatcctgggctggggagtggagaatggcacaccctactggctggttgccaactcctggaacactgactggggtgacaatggcttctttaaaatactc

SEQ ID NO: 13880 - DNA, 534 bp, Homo sapiens
tccaccgcggtggcggccgctctagaactagtggatcccccgggctgcaggaattcggcacgaggagacttggggccagcgcttctggtctggtaaatatgtatgatgtgttgtgctttttttaaccaaggaggggccagtggattcccacagcacaaccggtcccttccatgccctgggatgcctcaccacacccaggtctcttcctttgctctgaggtcccttcaaggcctccccaatccaggccaaagccccatgtgccttgtccaggaactgcctgggccatgcgaggggccagcagagggcgccaccaccacctgacggctggggacccacccagcccctctcccctctctgctccagactcacttgccattgccaggagatggccccaacaagcaccccgcttttgcagcagaggagctgagttggcagaccgggcccccctgaaccgcaccccatcccaccagccccggccttgctttgtctggcctcacgtgtctcagattttctaagaaccaaaaaaaaaaaggg

SEQ ID NO: 13881 - DNA, 512 bp, Homo sapiens
gtctggctcacctggaggaagaggtccacgacaaggtggttgcccgggacctggttggagccatgttgagcccactgccgcagccacgcccctctgccccccaggtgctggcccaccccttcttttggagcagagccaagcaactccagttcttccaggacgtcagtgactggctggagaaggagtccgagcaggagcccctggtgagggcactggaggcgggaggctgcgcagtggtccgggacaactggcacgagcacatctccatgccgctgcagacagatctgagaaagttccggtcctataaggggacatcagtgcgagacctgctccgtgctgtgaggaacaagaagcaccactacagggagctcccagttgaggtgcgacaggcactcggccaagtccctgatggcttcgtccagtacttcacaaaccgcttcccacggctgctcctccacacgcaccgagccatgaggagctgcgcctctgagagcctcttcctgccctactac

SEQ ID NO: 13882 - DNA, 773 bp, Homo sapiens
  misc_feature 1, 9, 616, 709, 724, 727, 735, 739, 744, 749, 755, 763: n = A,T,C or G
nacgacagnagggtatatttgtatatttacagttacaaaacaaatgtacttttaccttttatttctgaccctgtgtgttagagcagttgcatgctctcctgctgttaaaaacacattgttaagctgtggatttgtactcaataatgacttaggataaacatttattttcattcattgctttacatactagacatttttcttctctttgtaagtagattcaaattagatagtcaataaaacatcttgaaaatcccacaagccaattatgtctctctagtctgaatggcttcattgtttctttctcagtattagaaattatagttacaatgaattgcatatgaagaaggcagacatttatttttaatagccaagtagttctgcaaatagttcttttaacaatttgacctctctccaaaacagagacacatataagtagtgctcatccatgcactactaataatacatggcttattccaaagtttttagtcaacttttgggacttggggtgcattttctcacagaaagaatagtagttaggttccctaacactaccgctgatagctcacctgggaactgaatccacctaaccatgaatgtccttcacttgtaacgtggntcacagggtactaatcatagatcctgaccagcatttgtacactgctctactaggacacagcatgcagcagcacactccaccctgggagtctgngacctctgtcctagngtngaatgganaaanatcanccagngggagngcagagcncatttgaact

SEQ ID NO: 13883 - DNA, 475 bp, Homo sapiens
ctcctttccattgtcggatgagaatgatgtttttgacaagctaagtgtcattgcagaagactctgagagcggcaagcagaatcctggtgacagctgcagcctcgggaccccgcctgggcaggggccccaaagctaggctcttagaaggaaacacactcggctgggcacagtgacgtactccatctcacatctgcctcagtgagggatcagggcagcaaacgagggccaagaacatctgagccagccccacatctagaactcccagaccctggacttagccaccagagagctacattttaaaggctgtcttggcaaaaatactccatttgggaactcactgccttataaaggctttcatgatgttttcagaagttggccactgagagtgtaattttcagccttttatatcactaaaataagatcatgttttaattgtgagaaacagggccgagcacagtggctcacgcctgtaata

SEQ ID NO: 13884 - DNA, 568 bp, Homo sapiens
atctttctcttgccgcgtgctggtgttggaggaccctccctgcttcagatttaccaacagcatgaatcaagaaaagttagccaaacttcaggctcaggtccggatagggggcaagggtacagctcgcagaaagaagaaggtggtacatagaacagccacagctgatgacaaaaagcttcagagttctctaaaaaaactggctgtgaataatatagctggtattgaagaggtgaacatgattaaagatgatgggacagttattcatttcaacaatcccaaagtccaagcttccctttctgctaatacctttgcaattactggtcatgcagaagccaaaccaatcacagaaatgcttcctggaatattaagtcagcttggtgctgacagtttaacaagccttaggaagttagctgaacagttcccacggcaagtcttggacagtaaagcaccaaaaccagaagacattgatgaggaagatgatgatgttccagatcttgtagaaaattttgatgaggcatcaaagaatgaagctaactaaaagtttggtttttggaagctggcatggact

SEQ ID NO: 13885 - DNA, 499 bp, Homo sapiens
tccaccgcggtggcggccgctctagaactagtggatcccccgggctgcaggaattcggcacgagccccaacaggcatcaccccgctaaatcccctagaagtcccactcctaaacacatccgtattactcgcatcaggagtatcaatcacctgagctcaccatagtctaatagaaaacaaccgaaaccaaataattcaagcactgcttattacaattttactgggtctctattttaccctcctacaagcctcagagtacttcgagtctcccttcaccatttccgacggcatctacggctcaacattttttgtagccacaggcttccacggacttcacgtcattattggctcaactttcctcactatctgcttcatccgccaactaatatttcactttacatccaaacatcactttggcttcgaagccgccgcctgatactggcattttgtagatgtggtttgactatttctgtatgtctccatctattgatgagggtctt

SEQ ID NO: 13886 - DNA, 393 bp, Homo sapiens
tccaccgcggtggcggccgctctagaactagtggatcccccgggctgcaggaattcggcacgagctggactaggtctaccttgatcttgaagattcccttggaatgttgagatttaggcttatttgagcactacctgcccaactgtcagtgccagtgcatagcccttcttttgtctcccttatgaagactgccctgcagggctgaaatgtggcaggagctcccagggaaaaaggaagtgcatttgattggtgtgtattggccaagttttgcttgttgtgtgcttgaaagaaaatatctctgaccaacttctgtattcgtggaccaaactgaagctatatttttcacagaagaagaagcagtgacggggacacaaattctgttgcctggtggaa

SEQ ID NO: 13887 - DNA, 673 bp, Homo sapiens
atcggctgctgggcagtgccaatgtggtgaccgaggctctgcagcgctttacccgggcagctgctgactttgccacccatggcaagctcgggaaactagagtttgcccaggatgcccatgggcagcctgatgtctctgcctttgacttcacgagcatgatgcgggcagagagttctgctcgtgtgcaagagaagcatggcgcccgctgctgctgggactggtgggggactgcctggtggagcccttctggcccctgggactggagtggcacggggcttcctggcagcctttgatgcagcctggatggtgaagcggtgggcagagggcgctgagtccctagaggtgttggctgagcgtgagagcctgtaccagcttctgtcacagacatccccagaaaacatgcatcgcaatgtggcccagtatgcgtggacccagccacccgctaccccaacctgaacctccgggcagtgacccccaatcaggtacgagacctgtatgatgtgctagccaaggagcctgtgcagaggaacaacgacaagacagatacagggatgccagcaccgggtcggcaggcacccaggacgagctgctacgctggtgctaggagcagacagctgggtacccgggagtccacgtctccgatttgtcttcctcctgggctgatgggctagct

SEQ ID NO: 13888 - DNA, 592 bp, Homo sapiens
tcggcacgagttttttaactactgtgataatcaactttgatcctaacaatttaagaaatttgtataggaggataagaagaaccctaatctatagggaatgctcatgtccctgaaggaggacaggtcagtaagggcccaaattctctcctggtctttaggtggaaaggcaaaacatcacactttaaaaagaggctgctctcagccaaagcaagaaagacctctttcattaagcctattgatctgaagctattccaggaaggacaaaaaaagttcaagccagatgttcagcagcagccagagttggaccctatgtcacgagagttccgctgggaggcactgggtcccactgatgttgaaattgactgttggggcccaatcttgatgccatttgcctcattgtggacatcaaataaaccctgctggatcttcctatatatttctttggctgtgttaatgaaggcctcttcaacattgcaggctgttttggctgaagtttccatgaatataagtccatgctccctagcaaaggcctctccttcttctctcttcacatccctgcgggactctaggtcactgtaatcccagctactcg

SEQ ID NO: 13889 - DNA, 436 bp, Homo sapiens
ttttgtctcaagttcttttattcatataaataaagtttaaaggaatgggggagattaacatttcctgttttatgtttgtgaaattgtttgacacaaccttgacagtatcctttaatggcatgaggttaattgtactgttaaccaactttctatgttctggaactagtattatagtgaaaacatttacagtaagttgatgtttacaacctataagcaggtgaaatctgtgtatgtgacctgtttataagttgtattagcttagctcttgtgaacagtgtggaaaagtaagccatgaggagagcgatttaaccacctttaaaggacctaagatgtgctttttaagcacagtgtggatcacagaaactcactaagacaggacttcagcagccttttgtgtttggacaagtcagcataaataaagaatgacaaggcagca

SEQ ID NO: 13890 - DNA, 704 bp, Homo sapiens
  misc_feature 1, 563, 678, 686, 690: n = A,T,C or G
nggcaacgttgctggtgacagcaaaatgacccaccaatggaagcagctggcttcactgctcaggtgattatcctgaaccatccaggccaaataagcgccggctatgcccctgtattggattgccacacggctcacattgcatgcaagtttgctgagctgaaggaaaagattgatcgccgttctggtaaaaagctggaagatggccctaaattcttgaagtctggtgatgctgccattgttgatatggttcctggcaagcccatgtgtgttgagagcttctcagactatccacctttgggtcgctttgctgttcgtgatatgagacagacagttgcggtgggtgtcatcaaagcagtggacaagaaggctgctggagctggcaaggtcaccaagtctgcccagaaagctcagaaggctaaatgaatattatccctaatacctgccaccccactcttaatcagtggtggaagaacggtctcagaactgtttgtttcaattggccatttaagtttagtagtaaaagactggttaatgataacaatgcatcgtaaaaccttcagaangaaaggagaatgttttgtggaccactttggttttcttttttgcgtgtggcagttttaagttattagttttaaaatcagtactttttatggaaacacttgaccaaaatttgtccanaatttganaccnttaaaaaggtaatg

SEQ ID NO: 13891 - DNA, 591 bp, Homo sapiens
caagctacttgttctttttgcaggatcccatcgattcgaattcggcacgagatgggaccaaatttaagcaatttttgtttttggctgaagagacaccaaaatattagaggacaaatatttttagatccatttaaggagttttgaagtgcctaagatgacctatttgtcagtggtgcaaaattaattctcttcttttttgagttgtagtgaatatgcaatttctgtgttccccttccaccctttaaatcttaggatgacaagttataaagaaagaagatctttgtctgggacccccaaagggatcctttctctaaggtctctgacagtgggtccaggaccagacctctctacaaaaaattgccccaactacagtttgcaaccccaaaccacattagaagtctgtgcagacatccctccgtggtgtgtgtcttggtgcattggaaaaggagtcaggagccactgtgaggtgagaatgaaagtggatctcagctgggcacggtggctcacgcctgtaatcctagcaccttgggggtcaaggtgggtggatcacttgaggtcaggagtttgaggccagcctggccaacatggcga

SEQ ID NO: 13892 - DNA, 704 bp, Homo sapiens
  misc_feature 475, 554, 599, 609, 615, 622, 630, 636, 652, 654, 655, 671,675, 686, 694: n = A,T,C or G
cgttcccccgctacatagtctttcttttgtgttatttagtttaccatttcttttttccatcttgttataacctccacgagttgtgtctcttttgttttctacattatacccaacggctagcacataacaggcacccaatatatactgaacgaactaaggaatgaatgaaggaatgaatgaataggtggcttataggaaacccctggggccagggactctgcaacatcaccatgtaactttttctttgtgctgagaagcagagagaaacaatagaagatatctcttaatctctcaaggatgctactcccaggactgcttgcaatttccgaggagataagccacaagttacagaaaggaagcagctgtgtagggcctgcaagtttcctgctgcaagtcaccctatgttcagaagttaccctggctgggccaggcatggtggctcacgcctgtaatcccacactctggggaggctgangcaagtggattgcttgagtccaggagttttgagaccagcctgggcaacatggagaaaccccatctatcaaaaaaattanctgggtgtggtggcatgaagcctgtaatacccagcttccttgggnaaggcttaangtgggnagaaatnaccctganccccangggggtcaaaggctgntnnttaagccaagatcacngccnactggaccttnaagccctngggcaaaccc

SEQ ID NO: 13893 - DNA, 488 bp, Homo sapiens
  misc_feature 259, 311, 338, 402, 412, 420, 422, 425, 441, 454, 455, 456,459, 464, 466, 468, 480, 482, 483: n = A,T,C or G
gggatttaatacctctgtaaaatgaagcagttacttccattttcctgaggtgagataagtgccctgcacaatgttataggcccagtaagtgagactggagctctgatctaatccctttcacattaaagtttgtgcagtaaaccagctatgtcagtttgccacatttgtaatagtgttcaataaattttcacttaaaggtttaatattaaagtagtagcaagaattcataaccttaattggctttaacagcttttctttncctgaaaacagatgcatatgtacacatgcacacagattgcttacaatatcancacgtaaaaggcctttgcccattgaantcggcactgctttggtgccttttttggtttttggctcggggttttgactgcaatcttttggatnaaattttttnttaaaaananctnacccttgggttttttnggcccaaaaaaannnttnactancngnctttttttttgngnnttttt

SEQ ID NO: 13894 - DNA, 51 bp, Homo sapiens
aaaaatttccttcttaagtttgggaaatttttaaaaaaaaactttttccaa

SEQ ID NO: 13895 - DNA, 428 bp, Homo sapiens
tttgtacaaaaaacaggctggtaccggtccggaattcccgggatatcgtcgacccacgcgtccggtccaatattaaaataattttaaaatccagttccttattggcaaggtacttcctgacttcagggacaaagcatcagtggaaccaattcagaaaaaaggatttccattgtccaggccttctagttgtacaaccaaaagacaggcagctggtgctgatcttttcccttcaaggattgggggtgggggttagcagctttatagataagggcagttctgatcataaaccccactacgttttcatgaaacagtagagttagcctgtctctttttgttttcaatcctgctgcttgcttctcttcctactaaatgtcctttgtggtgtttttctaaaataggatactttcatctgcattaaaaacctgttc

SEQ ID NO: 13896 - DNA, 78 bp, Homo sapiens
tggtacgcctgcaggtaccggtccggaattcccgggtcgacatcatcatcatgatcgctcgacatcgatacgactttt

SEQ ID NO: 13897 - DNA, 533 bp, Homo sapiens
aaaagacagtcattcataatgataatgaagaacttatcaaggttgaagggaccaaaattgtcttggggaaacagctaattgagagtgcggatgaggttcgcagaaaatctctggttctcaagtttcctaaacagcagcttcctccaaagaagaaacggcgagttggaaccactgttcactgtgactatttgaatagacctcataagtccatccaccggcgccgcacagaccctatggtgacgctgtcgtccatcttggagtctatcatcaatgacatgagagatcttccaaatacataccctttccacactccagtcaatgcaaaggttgtaaaggactactacaaaatcatcactcggccaatggacctacaaacactccgcgaaaacgtgcgtaaacgcctctacccatctcgggaagagttcagagagcatctggagctaattgtgaaaaatagtgcaacctacaatgggccaaaacactcattgactcagatctctcaatccatgctggatctctgtgatgaaaaactc

SEQ ID NO: 13898 - DNA, 477 bp, Homo sapiens
agttttgtttctttattatttaaaaaatattaacagcaattaaaaacaacaacaacaacaaaaaaaacattcacaacctgtcacagagtcctataagctttggccatttattcccaacggagtctttcatccaaaggcaggtggggaatttcagccaaaaggccccttcatggttttcatgggtgggtactgctgctccatcggcatggccccaaagcagtcagagggattacagtggccagccttgcctggctggcccatgggacccgggggcccagggatgccagggatgccttgctggcccattggtcctgttgcacccatcttgccatagcctggaggaccttgaggacctggggggccgggaagaccattttctcctgcaatgccaataccaatgtcccctttttcacctttggtaccaggcaatcctcttactcctggcaagccctgccgtccttctctgccaatctgacc

SEQ ID NO: 13899 - DNA, 407 bp, Homo sapiens
tcggcacgagggtgaagaacagctggggtgaagaatggggcatgggtggctacgtaaagatggccaaagaccggagaaaccattgtggaattgcctcagcagccagctaccccactgtgtgagctggtggacggtgatgaggaaggacttgactggggatggcgcatgcatgggaggaattcatcttcagtctaccagcccccgctgtgtcggatacacactcgaatcattgaagatccgagtgtgatttgaattctgtgatattttcacactggtaaatgttacctctattttaattactgctataaataggtttatattattgattcacttactgactttgcattttcgtttttaaaaggatgtataaatttttacctgtttaaataaaatttaatttcaaatgt

SEQ ID NO: 13900 - DNA, 485 bp, Homo sapiens
tcggcacgaggaggccatcggctttgtcaaggatgtagccaacatcacaatctatgacgaggaagcgatggtggaggctgtggccctctacaaccctgtgagctttgcctttgaggtgactcaggacttcatgatgtatagaacgggcatctactccagtacttcctgccataaaactccagataaagtaaaccatgcagtactggctgttgggtatggagaaaaaaatgggatcccttactggatcgtgaaaaactcttggggtccccagtggggaatgaacgggtacttcctcatcgagcgcggaaagaacatgtgtggcctggctgcctgcgcctcctaccccatccctctggtgtgagccgtggcagccgcagcgcagactggcggagaaggagaggaacgggcagcctgggcctgggtggaaatcctgccctggaggaagttgtggggagatccactgggacccccacattctgccctca

SEQ ID NO: 13901 - DNA, 569 bp, Homo sapiens
  misc_feature 447, 455, 490, 507, 519, 533, 565: n = A,T,C or G
gctacaaaatgcatttatttccagtcagacaaaattcttgaactgtatattcgggtacatattataaggtcatctttgatatatgccctgtttacaagatccatttctaattattaaagtgaatatcaaacacacatctttgcatcttaaaacataaataaactgctaatgtttataagccacaaatctggtcactgacatgagtggcctgcaattcttcagtgatgagcacacggcgatacagacaagatcagattacccaggtaggcaggcagcaggcacctgtaattcacccgctgactgtgctgttgtggcagtgacccttcttgtgaaaaaagagttatgtgcagacaaaagtgtgacatatgcaacgtggagaggcatttcacagaatgcaaacaccattcaggtaaaatttagtagactccagaatgaatgaaagcttcntgaatgcnaacctgttggtttacaatactggggcattgtggcncctttcactgggacagnttaataaattcnatttaagaaagtangggtaggggagaagctgaaccatcctttttgntgct

SEQ ID NO: 13902 - DNA, 412 bp, Homo sapiens
agtggatcccccgggctgcaggaattcggcacgagcagaggtggaattggggcccggcattccctcctcgtcccgggctggcccttgcccccaccctgcaactcctggttgagatgggctcatccaagagcgtcccagtcacaccagcgcggtctccgccgcacaacaagcatctggctcgagtggcggacccccgttcacctagtgctggcatcctgcgcactcccatccaagaggagagctctccacagccatgcctaccagcaggggagcaactggagggtcttaaacatgcccaggactcagatccccgctctcctactcttggtattgcacggacacctatgaagaccatcagtggagaccccccaagcccactggtgaaacagctgagtgaagtatttgaaactga

SEQ ID NO: 13903 - DNA, 589 bp, Homo sapiens
  misc_feature 488: n = A,T,C or G
tccaccgcggtggcggccgctctagaactagtggatcccccgggctgcaggaattcggcacgagtgacttccgaaccaagtttgagacggaacaggctctgcgcatgagcgtggaggccgacatcaacggcctgcgcagggtgctggatgagctgaccctggccaggaccgacctggagatgcagatcgaaggcctgaaggaagagctggcctacctgaagaagaaccatgaggaggaaatcagtacgctgaggggccaagtgggaggccaggtcagtgtggaggtggattccgctccgggcaccgatctcgccaagatcctgagtgacatgcgaagccaatatgaggtcatggccgagcagaaccggaaggatgctgaagcctggttcaccagccggactgaagaattgaaccgggaggtcgctggccacacggagcagctccagatgagcaggtccgaggttactgacctgcggcgcacccttcanggtcttgagattgagctgcagtcacagctgagcatgaaagctgccttggaagacacactggcagaaacggaggcgcgctttggagcccagctggcgcatat

SEQ ID NO: 13904 - DNA, 500 bp, Homo sapiens
ttttcttctaaactacttcgacaagacaaaagaacagtgtatgtttacttggaaaagttcatgacctttcagatgtcactccgaagagaggatgtgtggcttccactgatgtcttaccgaaattctttgctagctggtggtgatgatgacaccatgtcagtcattagtggaatcagcagccgggggtcaacagtacggagtaaaaaatcaaaaccatctacaggaaaacggaaagtggttgagggcatgcagctttcactcactgaagaaagtagtagtagtgacagtatgtggttaagcagagaacaaacactgcacacccctgttatgatgcagacaccgcaactcacctccactattatgagagagcccaaaagattacggcctgaggatagcttcatgagtgtttatccaatgcagactgaacatcatcaaacacctcttgattataatcggcgtggcacaagcctaatggaagatgatgaagagccaattgtgga

SEQ ID NO: 13905 - DNA, 537 bp, Homo sapiens
  misc_feature 395, 415, 429, 460, 464, 500, 512, 532: n = A,T,C or G
gggctatatattacataatgtgttaatgaaatgactagaaaaccttgagaacaaacaagaaacaaaggaaatttcagaatttctttctttcataatccacataaccactcctcctactctctctagtagaccttctggacatttaaatagtcaaaacgtggtcacttttggtggtgagtcatgtgggaaactgactgggagagaatatattcgggttttctggagttaaggaaatgctctacatcaaaagcggtgtgaggtcatctgctttgcaatttgtgtaaaaattttacagttaagattagcttatttcaatgtatgtaaattttccctcaaaaatcacaactgtaggccgggcgtggtggctcacgcctgtatcccagcactttggggangcccaggtgggaggatcacnaggtcaggatatcnagaccatcctggctaacatgctgaaaccccntctntctaaaatccaaaaattagctggcctggtggcgggntcctgtatcccnctactcaggaggctgaggcnaagat

SEQ ID NO: 13906 - DNA, 441 bp, Homo sapiens
ggaaacaaaggatattttattccttttttctgttgttgttgaggatagatcacgatacagagaacagcaatgggtcacagcgcacggtttggttggtttccgcgggaacacagaggacaggaggggcgggatctgggttgagttcccactctcgttatgaccttcaacctctcactgttcccaagggctgcacggagcctgctgagtctccaacccacctcgctcaccgctctgaccactgacaggcagagcaaaggatgcgggagttgcctctgctgcccatctaaggggacgtaggcagagaagcaaaggcctctgctctccctccatccatcccggtgtgctggccccaacggaacaggagtccttcaactattgcctgccagaagacccaattgcagggactgtagtctgcatctggatgagctgggctgtagattg

SEQ ID NO: 13907 - DNA, 635 bp, Homo sapiens
tgggggacaccttcatccgtcacatcgccctgctgggctttgagaagcgcttcgtacccagccagcactatgtgtacatgttcctggtgaaatggcaggacctgtcggagaaggtggtctaccggcgcttcaccgagatctacgagttccataaaaccttaaaagaaatgttccctattgaggcaggggcgatcaatccagagaacaggatcatcccccacctcccagctcccaagtggtttgacgggcagcgggccgccgagaaccgccagggcacacttaccgagtactgcagcacgctcatgagcctgcccaccaagatctcccgctgtccccacctccttgacttcttcaaggtgcgccctgatgacctcaagctccccacggacaaccagacaaaaaagccagagacatacttgatgcccaaagatggcaagagtaccgcgacagacatcaccggccccatcatcctgcagacgtaccgcgccattgccaactacgagaagacctcgggctccgagatggctctgtccacgggggacgtggtggaggtcgtaaagaagagcgagagcggttggtggttctgtcagatgaaagcaaagcgaggctggatcccagcgtccttcctcgagccc

SEQ ID NO: 13908 - DNA, 475 bp, Homo sapiens
  misc_feature 80: n = A,T,C or G
tccaccgcggtggcggccgctctagactagtggatcccccgggctgcaggaattcggcacgagtcggagaatgtggttancccggaaaatccagtaaatcctatgggtcagcaaatgccaatagaccaaggctttgcctctttacagccatcccttcatcatccttcaactaatcaaaatcaaacaaagctgacacattttgatcactataatcagtatgaacaacaaaagatgcatctgatggatcagccgaacagaatgatgagcaacacccctgggaacggactcgcgtctccgcactcgcagtatcacacccctcccgttcctcaggtgccccatggtggcagtggtggcggtcagatgggtgtctaccctggcatgcagaatgagaggcatgggcaatcctttgtggacaacaactccatgtggggccccagggctgttcaggtaccaaaccaaatacgagccccctacc

SEQ ID NO: 13909 - DNA, 430 bp, Homo sapiens
aaaccttaacccagagttatttttattttccagaacgtgttaggaactagtacttaaataatctcaagtccctgaggggccagagatcccaccatgcaaaatagcaaacagacccaagacttggggagaggcggtgagtgcatcagaaatggatgggtacatctgattcccaccacgcggggctcagcttagttagcaggagaccttcagactgagaaaaaatgcaagtctttttttggcctctaatatctgggaaggatggagggagctcaggagacacagaaaagatggcgtatgaatcctgtccggcctgaacgaggctggagttgtgcctctggatagcttcaagcactgatcagattgtcagcccccgctgcttgaacagatgctttagagcctcttccagttgccggtttgttccctgaagccc

SEQ ID NO: 13910 - DNA, 657 bp, Homo sapiens
acaagctacttgttctttttgcaggatcccatcgattcgaattcggcacgaggccttctctggcctcaccaattaggtcaaatgttccttagaatgtgttgtggggcatggtctctccctgtgaggacctgtccagctggacctccgccttcctgcgactgtattggtgtctttccctctcaagcctatgagctctgcaagggcagggaccctgtatgattttgcctatcgtatgtcctccagcccccagcacagcgcctggtgtccagtgagagctcagcaaatactttgtgagttaaggacaggcggctgggtagatggatcgtctgcctagacagggcagttattccgctgtgagcaactcttagagaaacttcattttttttcggcgcctggccgaaacttcaagatgtttcccggccaggaacggtggctcacacctgtaatcccagcactttgggaggctgaggtgggtggatcacctgaggtcaggagttcgagaccagcctggccaacacggtgaaaccccgtctctactaaaaatacaaaaattagctgggtgtggtggtgggcgcttgtagtctcagctacttgggaggctgaggcaggagaattgcttgaacccgggaggcggaggttgcagtgagtcgagactga

SEQ ID NO: 13911 - DNA, 526 bp, Homo sapiens
caagctacttgttctttttgcaggatcccatcgattcgaattcggcacgaggctggagcacgctggagaggccatccctgccctggcagccgcggctgggggagactcctttgccccattctttgccggtttcctgccattattggtgtgcaagacaaaacagggctgcacagtggcagagaagtcctttgcagtggggaccttggcagagactattcagggcctgggtgctgcctcagcccagtttgtgtctcggctgctccctgtgctgttgagcaccgcccaagaggcagaccccgaggtgcgaagcaatgccatcttcgggatgggcgtgctggcagagcatgggggccaccctgcccaggaacacttccccaagctgctggggctcctttttcccctcctggcgcgggagcgacatgatcgtgtccgtgacaacatctgtggggcacttgcccgcctgttgatggccagtcccaccaggaaaccagagccccaggtgctggctgccctactgcatgccctg

SEQ ID NO: 13912 - DNA, 615 bp, Homo sapiens
ggaacaaaagctggagctccaccgcggtggcggccgctctagaactagtggatcccccgggctgcaggaattcggtacgagcctatttatgaacccaacatgttgggtggaatctctactgggtgttttatcttatctttactttcttaatagatgtatgctttacaaataaacacataataagatgggattgctggggtttttttccctatactaagggtaattttattttactccaatatcttgacctatttatgtttactgtcatgaatatgtaaaatgtataaaatgttcaatattatttatgttcatcttatttcatgcttttggttttgggagaaatctttattttttttcgtgttttcttatagtttcacatcatgttctatttattgtgtcttctgcagtgatatgaaaattgtcaattttaaaaatgtatactggtgattacccttgagttttacattaagacttgaaacaggccgggtgtagcggctcatgcctgtagtcccagcactttgagaggccaaggtgggtggatcacttgaggtcaggagtttgagaccagcctggccaacatggtgacacccggcctctactaaaaatacaaaaatt

SEQ ID NO: 13913 - DNA, 586 bp, Homo sapiens
  misc_feature 156, 458: n = A,T,C or G
tgattacgatttaatacgactcactatagggaatttggccctcgaggccaagaattcggcacgaggcgcccgggcatagcaccatgcctgcttgtcgcctaggcccgctagccgccgccctcctcctcagcctgctgctgttcggcttcaccctantctcaggcacaggagcagagaagactggcgtgtgccccgagctccaggctgaccagaactgcacgcaagagtgcgtctcggacagcgaatgcgccgacaacctcaagtgctgcagcgcgggctgtgccaccttctgctctctgcccaatggccaactggctgagtgattcgaagaaagtgaggaatcctccctggacactgtatcgcccttcgtcgtctttcagtcaatctcttccactctaaggattgagtgagcgcgagctggggactctctctgagataaggagggttcctgcccccangtgaacattaactttccccagctcggcctctgtcgggaccagtgccaggtggacagccagtgtcctggccagatgaaatgctgccgcaatggctgtgggaaggtgtcctgtgtcactcccaatttctg

SEQ ID NO: 13914 - DNA, 660 bp, Homo sapiens
acgccaactcgaattaaccctcactaaagggaacaaaagctggagctccaccgcggtggcggccgctctagaactagtggatcccccgggctgcaggaattcggcacgagggaattccacgggttattctgtcggcatctatcactctctgtgtggtcctctacttcatcctcatggcccaaagcatccacatgtatgcagccagggtccagtggggcctggtcatgtgcttcctgtcttattttggcacctttgccgtggagttccggcattaccgctatgagattgtttgctctgagtaccaggagaatttcctaagcttctcagaaagcctgtcagaagcttctgaatatcagactgaccaggtgtaaaccatcagtttttccttgctggtgaggtgggtgtgacagtgggggaggggccagtaggacacactcacaggacttgacatagaacctcatttcacacacacacacacacacacacacacattcatggccacatttgccaaatgagcttttcagggcgagttatttctttaatgaaaaagcacaagcccttatgtgtcgaaatacacgctgttacactgaatatatatgcacgacagagcaagaagcttgtgcatgatcacttcttatccgtccccttcccagcactccc

SEQ ID NO: 13915 - DNA, 508 bp, Homo sapiens
tatgacgtcgcatgcacgcgtacgtaagcttggatcctctagagcggccgcctactactactaaattcgcggccgcgtcgacgagcctcaatcctgtccacataaaggagtggagcccggtccccctccagggaggggaaagaactcgtgtccagggatccacgccatggcagacgtgggctcttggggtagcaggagccgccttatgggggaatagggctcagctggtgacaccttctgcccacaggtgccaagtcctgccctgccaacttcttggcagctgccgacgacaaactcagtgggttccagggggacttcctgtggcccatactggtggttgagttccaggcggcacgcggcctccccatagcgccagtgcttggggggatagaggtagggtcgacgcggccgcgaatttagtagtagtagtagtcgacccgggagttccggaccggtacctgcaggcgtaccagctttccctatagtgagtcgtattagagcttggcgt

SEQ ID NO: 13916 - DNA, 747 bp, Homo sapiens
  misc_feature 1, 9, 590, 676, 685, 701, 714, 725, 729, 734, 738: n = A,T,C or G
nacgacagnagggacaagcagcctttggggtccatcctgtgatgagcttgatcaaattgtggaaagctgtcttcttcctgagctgaatgtgggagattggcttatctttgataacatgggagcagattctttccatgaaccatctgcttttaatgattttcagaggccagccatttattacatgatgtcattcagtgattggtatgagatgcaagatgctggaattacttcagactcaatgatgaagaacttcttctttgtgccttcttgcattcagctgagccaagaagacagcttttccgctgaagcttaaacaggcattaacgcttctttagatctgaagttgcaggttaagcttgtctggtcaacattccagtgtggaaaaataatttaaacaatcttattctcttaattcttttggcaacaaaaactattagtaatagctatttgggaccagacaaaatcagctttcatctataattcattggggataatgggagatttagataatgtatccagatttaaacctaccagtatgtcctaccccttaagcgtttaaaataaaatatgcaacaaaatggatgacttantggagatggaagcccattaattgggttccccattaaatcgtttacatacaagaacacagttttatactaaggatttgtgttaaagncttgaaagntcatgtctttcaccanaatatcaaaggtnaagacaggggnctcntaganatgntagggattc

SEQ ID NO: 13917 - DNA, 322 bp, Homo sapiens
  misc_feature 37, 55, 85, 89, 96, 106, 125, 188, 198, 218, 219, 225, 228,275, 276, 282, 288, 292, 298, 305, 310, 315, 316, 322: n = A,T,C or G
ggggcatatggctacacgtttttatttatttgagacngagttttgcttttgtcgnccagactggagttgcaatggcgcgatctcngctnactgcancctctgcttnttgggttcaagagattctnctgcctcagccttcctataggtgggattccaggcccgcgccaccgtgcccggttatttgtgtnttttagtaanacagggttaccatgttggcnngctggnctngactcctgactaagtgatccgcctgctcacctccagggggggattcnngcgtgncccccncccncccccnttttttntgaancggtnnaaaccn

SEQ ID NO: 13918 - DNA, 518 bp, Homo sapiens
tggactccaccgcggtggcggccgctctagaactagtggatcccccgggctgcaggaattcggcacgaggggaatttggagcctgaggaggccaaactgatccgtgtccctcttcaacgaatccaccttggacacagaatcttaaacccactgaatggatgggaacagctggcagagctttctaggacctccacctctggtggcaacccctcctttgtgcctctctccaagttcatgaacacccagtattttggaactattggtttgggaacgcctcctcagaatttcaccgttgtctttgacacgggttcttccaacttgtgggttccgtccacgagatgtcatttcttcagtttggcatgctggtttcaccatcgctttaatcccaaggcctccagctccttcaggcccaatgggaccaagtttgccattcagtatgggaccgggcggctgagcggaatcctgagccaggacaatctgactatcggggggatccacgatgcttttgtgacatttgg

SEQ ID NO: 13919 - DNA, 588 bp, Homo sapiens
  misc_feature 505, 568: n = A,T,C or G
acatgtctattttttattcaatatattaaatatattaatcagaaaagtcacatactataaatccaggaaaatacacaaatataaatgtcagaatctgtcatttgtcttcttcctagagtgacagtttatgtacatgtggaaggagggtaggaagagagagccagcaggaggctggaaaggctgcccaggaaggcggggcccatcccttcctcccagccccgctcccacctcaagctctttcttcctgtatttacagcagcactgggcttatttacagcacggcgctatgtgttaaaaacggtttatcttacaaaaaacataaaggccggggccaggctgggggggataagacaaatcgtggggtcacccccatgaaggcatccccctccccaagggcttgagctccctgcaaacctcctggagcaggtgagaaggtggagtcattctgcagctcaagcccaggctttgggggtgctctgggggtcgtggactaaaggcacatggngtggcatatgagagtgcgcatgtgcacacgtggttccaggcaagggtcagaaaggcagcgtgnccatgaagacttgtccatga

SEQ ID NO: 13920 - DNA, 682 bp, Homo sapiens
gcggccgcccccgcccgtctcctctgtccctgggcccgggagggaccaacttggcgtcacgcccctcagcggtcgccactctcttctctgttgttgggtccgcatcgtattcccggaatcagacggtgccccatagatggccagctttcccccgagggtcaacgagaaagagatcgtgagatcacgtactataggtgaacttttagctcctgcagctccttttgacaagaaatgtggtcgtgaaaattggactgttgcttttgctccagatggttcatactttgcttggtcacaaggacatcgcacagtaaagcttgttccgtggtcccagtgccttcagaactttctcttgcatggcaccaagaatgttaccaattcaagcagtttaagattgccaagacaaaatagtgatggtggtcagaaaaataagcctcgtggaacatatatagactgtggagatatagtctggagtcttgcttttgggtcatcagttccagacaaacagagtcgctgtgtaaatatagaatggcatcgcttcagatgtggacaagatcagctacttcttgctacagggttgaacaatgggcgtatcaaaatatgggatgtatatacaggaaaactcctccttaacttggtagatcatactgaagtggtcagagatttaactcttgctccagatgga

SEQ ID NO: 13921 - DNA, 603 bp, Homo sapiens
cggcacgagggccgtcgcagccgtggcatcgttgaggagtgctgtttccgcagctgtgacctggccctcctggagacgtactgtgctacccccgccaagtccgagagggacgtgtcgacccctccgaccgtgcttccggacaacttccccagataccccgtgggcaagttcttccaatatgacacctggaagcagtccacccagcgcctgcgcaggggcctgcctgccctcctgcgtgcccgccggggtcacgtgctcgccaaggagctcgaggcgttcagggaggccaaacgtcaccgtcccctgattgctctacccacccaagaccccgcccacgggggcgcccccccagagatggccagcaatcggaagtgagcaaaactgccgcaagtctgcagcccggcgccaccatcctgcagcctcctcctgaccacggacgtttccatcaggttccatcccgaaaatctctcggttccacgtccccctggggcttctcctgacccagtccccgtgccccgcctccccgaaacaggctactctcctcggccccctccatcgggctgaggaagcacagcagcatcttcaaacatgtacaaaatcgat

SEQ ID NO: 13922 - DNA, 367 bp, Homo sapiens
  misc_feature 19, 66, 76, 247, 256, 270, 297, 346: n = A,T,C or G
ttgttgttttttgtcagcntttgggcactttttctgggcaaccgtggcggcgtgtgcactccagtnttgccaaggntggggatacggggggccagggtgggggtcagggagggtttccagcgcaggaggggagggctgtcggctcccagcctttccaccagggcctggctggctggggctggggcggagggccacgggagctgcgaggctgcggacaggagtctgcggcctctagtacttagcgatntcccccttnttcaggatgacctntcgctgccagggcgccacttagctctnatcgtagcccagcgtccgcagcttctctgactgttccttctcccgccgnagctcctcctgcttcttgtcg

SEQ ID NO: 13923 - DNA, 593 bp, Homo sapiens
tccaccgcggtggcggccgctctagaactagtggatcccccgggctgcaggaattcggcacgagggttaatggtcatggtcacctggtcactccaacaatatctattgtttcgtacctctttgctaaatcgaacactgtatacaatccagtgatttatgtcttcatgatcagaaagtttcgaagatcccttttgcagcttctgtgcctccgactgctgaggtgccagaggcctgctaaagacctaccagcagctggaagtgaaatgcagatcagacccattgtgatgtcacagaaagatggggacaggccaaagaaaaaagtgactttcaactcttcttccatcatttttatcatcaccagtgatgaatcactgtcagttgacgacagcgacaaaaccaatgggtccaaagttgatgtaatccaagttcgtcctttgtaggaatgaagaatggcaacgaaagatggggccttaaattggatgccacttttggactttcatcataagaagtgtctggaatacccgttctatgtaatatcaacagaaccttgtggtccagcaggaaatccgaattgcccatatgctcttgggcct

SEQ ID NO: 13924 - DNA, 600 bp, Homo sapiens
tccaccgcggtggcggccgctctagaactagtggatcccccgggctgcaggaattcggcacgagcatagcaagaccctgtctctacaaaaataaacaaaaaacagaaagaaagaaacagtctacttagagttaatattgtaccactttatgtaaaatgttgaagcctgacaactgcatagttccatttactgctcctgctttatgttatagtttaaaatatatagaacctctatatatgttataaattccacagcacaaggttttaatttttgctttaaactatcatatgcatttttaagttaagaagaataatagtttttaaatatttactgtttctaatgctcttgattccttttgaagatacaggtttccaaatggtatcattccacttcagcctacagaacatcttttaatatttcttatagtccacattggctggctgtgtaaaaagggtgtgttagaaacacatttttagcattttttttaattggacaatgtcagattcctggaggatattttcactggatgtcaagttctagattgctagttttgtctctcagtcctttaaagatgtggtttcgtctctactaaaaatgcaa

SEQ ID NO: 13925 - DNA, 303 bp, Homo sapiens
  misc_feature 26, 35, 60, 117, 170, 174, 181, 188, 189, 196, 197, 198,201, 207, 222, 240, 246, 255, 264, 276, 287, 290: n = A,T,C or G
gggggtttagaaacatgttatagcanttcttgctntatagcatactataataaccagcantcattccactgtcctgccaaggtacacctcattactccccttcccactgaagtggtntgaggctagctctttccaaagccttccagtttggcttctgatgtgactcatantttnggaaccngatgctnnatcaatnnnctntgaaantctgaggaccttgtnggaagggttgttaacctnttttantgcctgatnaccttacanccggccgggggntcccccttatnccnccctttggaggcc

SEQ ID NO: 13926 - DNA, 782 bp, Homo sapiens
  misc_feature 1, 696, 713, 716, 720, 738, 754, 776: n = A,T,C or G
natgcttaaaatagcagaagatctgggaggaccgtatgtatggggacagtatgacctattggtcctgccaccatccttcccttatggtggcatggagaatccttgccttacttttgtaactcctactctactggcaggcgacaagtcactctccaatgtcattgcacatgaaatatctcatagctggacagggaatctagtgaccaacaaaacttgggatcacttttggttaaatgagggacatactgtgtacttggaacgccacatttgcggacgattgtttggtgaaaagttcagacattttaatgctctgggaggatggggagaactacagaattcggtaaagacatttggggagacacatcctttcaccaaacttgtggttgatctgacagatatagaccctgatgtagcttattcttcagttccctatgagaagggctttgctttacttttttaccttgaacaactgcttggaggaccagagattttcctaggattcttaaaagcttatgttgagaagttttcctataagagcataactactgatgactggaaggatttcctgtattcctattttaaagataaggttgatgttctcaatcaagttgattgaaatgcctggctctactctcctggactgcctccataagcccattatgatatgactctgacaatgcttgattgccttagtcnaagaggatactgccaanaanaganttaattcttcatgcccanacctgaggtctttttntatcatgaagagttttaaccanacctca

SEQ ID NO: 13927 - DNA, 275 bp, Homo sapiens
agtgaacagttacagaagaatggtctgagaaaaaatggtattttgaaaaatggcttgatctgtgacttcaagtttggaccgtggaagaacagcactttcaaacccacaactgagaatgatgacacagagacaagtagcagtgattcatcagatgacgacgatgtgtgaaggatttcctaacagctttagaaatcttagtgtgatacatctctcatacagtttggggtgaattgtaaaaatgaagaactataatttatgtagtgaaataccccatt

SEQ ID NO: 13928 - DNA, 750 bp, Homo sapiens
  misc_feature 22, 519, 554, 581, 601, 621, 627, 629, 668, 695, 727: n = A,T,C or G
aagttgtagtcactgtctgagnaatggctatgaagcgtcatttcacattttaccccaactgacctgcatgcccaggacacaagtaaaacatttgtgagatagtggtggtaagtgatgcactcgtgttaagtcaaaggctataagaaacactgtgaaaagttcatattcatccattgtgattctttccccacgtcttgcatgtattactggattcccacagtaatatagactgtgcatggtgtgtatatttcattgcgatttcctgttaagatgagtttgtactcagaattgaccaattcaggaggtgtaaaaataaacagtgttctcttctctaccccaaagccactactgaccaaggtctcttcagtgcactcgctccctctctggctaaggcatgcattagccactacacaagtcattagtgaaagtggtcttttatgtcctcccagcagacagacatcaaggatgagttaaccaggagactactcctgtgactgtggagctctggaaggcttgganggagtgaatttgcccacaccttacaattgtggcangatccaaaagagcctgtcttttatatncattccttgatgtcattggnctctccaccgatttattacngggccncncagtcttggtctgggtagtccggaaacaaaaggaggganacagcctggaatgaataaaaccttacncagtttctctgggaaaacataaaaaccttctnttttttttctttaaaataaaaag

SEQ ID NO: 13929 - DNA, 243 bp, Homo sapiens
  misc_feature 4, 13, 22, 26, 28, 31, 32, 40, 49, 59, 60, 69, 82, 100, 104,114, 126, 130, 150, 155, 159, 164, 169, 184, 187, 192, 194,198, 207, 231, 239: n = A,T,C or G
aggncccgctgtntagcattcnccananagnntctgctgntagaacacntcgcctgggnncggctgctnaatgactacatgnagggtgcgggcctgctanctcnctacagtaangttgctgtatgncgtnattacgacgagaatgccacnttctncatnaaagncgacntaaacggtacggatngcntgtantnctgnctccaatgntatgggactgccctgaagtactancacaaggnccct

SEQ ID NO: 13930 - DNA, 533 bp, Homo sapiens
ttacttaaataatctttatttctcatgcactaggaaagatggttcgtatgaaacactgcagttcacagcaaaggcctcagtccagaacacaacataggggccagctgggatcacaatctggtcaaagctctgggagccacactgggaacaccactcccggggttgagtggcagatccaggactttgcagcaactgtggccccagacataacacaaggcagctgcctctcccacagaggcacaggaagctgacacccaaggagcacgtgggctggggacaggacggagaaggctgctgggcagtgacttggcggagatgtggtccagcacctctgccgcctgcgtctacccactcaggccaggaagcccaggcctgtgactgagctctaggcccagctctacccagtgcagagctgctggagttccacagaccctcagcagccccgtgcccacagcagaggtgtagaagttccccgcctgcccctcggctacatgaacaagacaggggcctaaacttcggacctggcaaggctt

SEQ ID NO: 13931 - DNA, 501 bp, Homo sapiens
  misc_feature 342, 363, 415: n = A,T,C or G
tccaccgcggtggcggccgctctagaactatggatcccccgggctgcaggaattcggcacgaggaggaatttatccatttcttctagattttctagtttatttgcatagaggtgtttgtagtattctctgatggtagtttgtatttctgtgggatcggtggtgatatcccctttatcattttttattgcgtgtatttgattcttctctctttttctctttgttagtcttgctagcggtctatcaattttgttgatcctttcaaaaaaaccagctcctggattcattaattttttgaagggttttttgtgtctctagttccttcagttctgctctgattttanttatttcttgccttctgctancttttgaatgtgtttgctcttgcttttctagttcttttaattgtgatgttanggtgtcaattttggatctttcctgctttctcttgtggtcatttagtgctataaatttccctctacacactgctttgaatgtgtccc

SEQ ID NO: 13932 - DNA, 93 bp, Homo sapiens
gcaccacgcatgtctggccgagcctctggaatgagcactcctctgctggggagatggtctccacctgcactcccatgggagcggccgatgctg

SEQ ID NO: 13933 - DNA, 300 bp, Homo sapiens; identical to SEQ ID NO: 11072

SEQ ID NO: 13934 - DNA, 525 bp, Homo sapiens
aagtttgtacaaaaaagcagctggtaccggtccggaattcccgggatatcgtcgacccacgcgtccgatcttactaagttaaaaaacttttttgaacttttctgaatagaaatgttcttggaattcgtcgtgcacatgattgttcataattactaattacaaatattactaattattatttctattatatataatatgtataatattattaattattcataattactaattgaaatagagacgctagttgttggggtaacaaaagtagtgcatttttgagatgaagctggctttcagtacaaacatattctaaattatgctggtggctatgcagtttttctctgtgctggtcatcaacaattagatttagatgtgtttgagcacttgaagaagtactatgaaactgaacttaaataaaagtatttagcaattgtgatgccaaaaagctttagcttgtgaagctttatcaatttccaattcttaaaagcaaaggttgtaaagaggaagacattgaaactgatcctt

SEQ ID NO: 13935 - DNA, 510 bp, Homo sapiens
aaatgtgattttgttggcatctagaaccagtgtattttttatttatgtactgaaaaataatcattgtggggttttaaaatgaaaaatcatgtacctaatgcctatcgctatatgaaattgttatgttagggaaaatgggtacttaatctttgctttattacatagattatgataaaaatgttaaaggtctcctgagtgaaattttaaaccttcaaatgactacacaaggtaaatacatattttataggcctatacctcatataatcgacaagctgaaagagttctttaagatctaactataagtcctctggtctatagaatgactgagtgaggcttgggtttcacctctggcttcttaactagctatgagactctgggcagttcatttgtaccctctaaggttgtcagttaattcatctgtaaaagggaattaatgccatctatctcatggagttgttcattttgttcatttcaacaatatttattgagtgcttatctgtgtatgatgct

SEQ ID NO: 13936 - DNA, 183 bp, Homo sapiens
ggtcttttcttggcagctacaatctctggtatcttgaaagtcaaatctaattgaataggaaataaatgcatgctggtaactctggggattttatttccctaatttctgctattgctgcaaataaaaaaaaaagttaccaattttttagcccaggcattcaccaagcaataacaaaaaccactt

SEQ ID NO: 13937 - DNA, 452 bp, Homo sapiens
ctggctgccaggaactgtgtcattgatgacacacttcaagttaagatcacagacaatgccctctccagagacttgttccccatggactatcactgtctgggggacaatgaaaacaggccagttcgttggatggctcttgaaagtctggttaataacgagttctctagcgctagtgatgtgtgggcctttggagtgacgctgtgggaactcatgactctgggccagactccctacgtggacattgaccccttcgagatggccgcatacctgaaagatggttaccgaatagcccagccaatcaactgtcctgatgaattatttgctgtgatggcctgttgctgggccttagatccagaggagaggcccaagtttcagcagctggtacagtgcctaacagagtttcatgcagccctgggggcctacgtctgactcctctccaatcccacaccatc

SEQ ID NO: 13938 - DNA, 611 bp, Homo sapiens
  misc_feature 544: n = A,T,C or G
gattccaaatgccccttttattaaaaataattgcacttaaaatttaaaatctcccaagtcctgtgaattttcctgagttcccaggcttgctcggggaccggcaggcatccagccctctgggcagccgggcagcggtcgcgttggggcaaagcagcaggcgcgaagcaggagctcaggtgcataccccacacctccacctgagcacccccttctccggtgctgggaacagatggaggggggtggctaatactacccgcatgccggcaacaggtgaggagggcaaaccttacaatcttattaacacagagcagccctccagggccccagcccacagtgcgatctagggagaaagctctcctagacacgttgggggccagagccccggcccaggaggtggaaacaagcgatgcggcggcttggaatggttagtgcccagctccaggtgacacatgcaacccccaggcccgcacacagctgctgcccgcacacaggctctgcttccctggggaaccagcctccctctggagagactaacacactccgncccgctaacaccagctgacgagaaactgctctcccatcaacagcgagacacagatgtccaggacctt

SEQ ID NO: 13939 - DNA, 381 bp, Homo sapiens
cggcacgaggccgccatcgtggtgtgttcttgactccgctgctcgccatgtcttctcacaagactttcaggattaagcgattcctggccaagaaacaaaagcaaaatcgtcccattccccagtggattcggatgaaaactggaaataaaatcaggtacaactccaaaaggagacattggagaagaaccaagctgggtctataaggaattgcacatgagatggcacacatatttatgctgtctgaaggtcacgatcatgttaccatatcaagctgaaaatgtcaccactatctggagatttcgacgtgttttcctctctgaatctgttatgaacacgttggttggctggattcagtaataaatatgtaaggcctttcttttt

SEQ ID NO: 13940 - DNA, 729 bp, Homo sapiens
  misc_feature 12, 577, 601, 614, 657, 681, 686, 701: n = A,T,C or G
gggatcacaagnaagacagcatatatcagaacgtcctgtaatcatttagttagaaactaactactaactagtctttggaattcgtgacctatggagacagtaattatcaatttattgattctattgatttctcaaattaggaattaacttatgtggattttgcttcctcttgtattctgattgcccttcatcccaagtgtttactgaaaattccattctagatattcttgttttgacaaatgacactacagtctcgtaatattgtcttttatgtatatacaaaatttacctttttactagcatctgagatagagttactttctggtacccagtatattggagtctgtcagaaactctataataggccaccagtttttattatttaacatttttatttgaatttctaagaagcctattctctatctattttgaaagattttggcactatatttaattggaaggtaaaatattgtacatgtgatccagagtaaatgagaagtctctatctgagctggtcagttactggagtacatgttactaatctgggtttaaaggttacttcattatctgctagtgncatccacagcagttcatcctcatncacactaagcctnctgttagcttttaaaggaggtaatttaattaacataatatacnctatgggctccctcttccacctgnctgcntagaaggccgaatanactagctgctttggaaacaatagaatgt

SEQ ID NO: 13941 - DNA, 192 bp, Homo sapiens
gactcactatagggcgaattgggtaccgggccccccctcgaggtcgacggtatcgataagcttgatatcgaattcctgcagcccgggggatccactagttctagagcggccgccaccgcggtggagctccagcttttgttccctttagtgagggttaatttcgagcttggcgtaatcatggtcatagctgtt

SEQ ID NO: 13942 - DNA, 647 bp, Homo sapiens
gtaatacgactcactatagggcgaattgggtaccgggccccccctcgtgccgagagggagaaaacttcttcctggcctgggctccgtgccgctctgtttgccaaccgtccagtcccgcctaccagtgccgggcgctccccacccctcccccggctcccccggtgtccgccatggccaaagcctacgaccacctcttcaagttgctgctgatcggggactcgggggtgggcaagacttgtctgatcattcgctttgcagaggacaacttcaacaacacttacatctccaccatcggaattgatttcaagatccgcactgtggatatagaggggaagaagatcaaactacaagtctgggacacggctggccaagagcggttcaagacaataactactgcctactaccgtggagccatgggcattatcctagtatacgacatcacggatgagaaatctttcgagaatattcagaactggatgaaaagcatcaaggagaatgcctcggctggggtggagcgcctcttgctggggaacaaatgtgacatggaggccaagaggaaggtgcagaaggagcaggccgataagttggctcgagagcatggaatccgatttttcgaaactagtgctaaatccagtatgaatgtggat

SEQ ID NO: 13943 - DNA, 514 bp, Homo sapiens
gcgaattgggtaccgggccccccctttttttggtctgtagtctttacttggggttaagagttctgtgaacaagagggaacagaaaagtcaatcaggtagacagccaaattttttttattggggaaatgggtctctagggggtaggcctaggccctcactgcacagcttgttcattggcactgcctccagaatcctgtggcttcatcacatctggaagctctggagggctggaaaagggctcgatgcggagagcttcgaaggtgtcatctgctcggaaggccaggcccactgtggctggggcctgtggccgtgctgtctggctagtgaagccacactcgcccagagttttgccatcatcaaggagctggtcatccttgtaaagccgctgctcctctggcggccgcttgaggatgccctcgacgatgcgcttcagttcgaacacggtgctcgactccttggcgtccgtaaagatggtggtcttgtggcgccgctcgtgccgaattcctgcagcccg

SEQ ID NO: 13944 - DNA, 800 bp, Homo sapiens
  misc_feature 4, 11, 13, 22, 33, 35, 49, 56, 66, 68, 77, 107, 210, 251,584, 677, 696, 698, 705, 710, 714, 734, 766, 788, 791, 796: n = A,T,C or G
ttantttgggncnaaaaacccnccttttcttgntncttttggaccgcancggcctncggctgcganantacgacagnagggttgcattgctatccgtgggatacagnacgcttagctcttaaaagatttttttttatgtaaactgttgaatatttgaaatagtccacttcaccttaatgggtcttgtctatcttcattagtcctcaaagnaaaaaccatttgctaccaaagtaaatcagtattttgaatgngcttctcttgttttttgtttattagctagttcctgtaagcatttccaccagaacttgaggcaaatcgtaaggaagctgtttcttttaaaacacaaaccaccaccaaaaatttaaatgtacatattgcttaagtatttggctgtttttattttttaaaaggtataaacaccaaaaaaaaaattaacattgtatgaagatggaaaataagaagatgcactttctgtaactttgtctaaggatttaaattactaacttatgaactccaatttgaattgaacttaactatcggctttcttactggtaaaattatatggtttattttaaatgcgtacntattgaccaatggcctctgaaaaagcacattttagatactgaaattgaaggaaagaaaatgcatcttcaaacattttttggaatctcaccacntttactttgttagatttgngnattgganggggnttgntttgatttttgattggatanaaccttttttaaagggacaggttaaacacatntttaaagctagtccagacaaangcntcagnataa

SEQ ID NO: 13945 - DNA, 765 bp, Homo sapiens
  misc_feature 574, 581, 692, 703, 713, 718, 737, 745, 750, 751, 755, 761: n = A,T,C or G
tttgtttacagctgttgtcgcatctgcagatcgatctgaatagaaaacgtcaactctgtggaggctttgcaggaaactctcattcgtgcactaaggaccttaataatgaaaaaccatccaaatgaggcctctatttttacaaaactgcttctaaagttgccagatcttcgatctttaaacaacatgcactctgaggagctcttggcctttaaagttcacccttaaggcctttgtttatttaaacatgaactgatggtaactgtacattttgtgctaaaatgcatatttatatgtgtataccatatgtggagatagaaaagacctttaagacaataaaagattgtaggctatctctgtaatcatgcaatagctgttcggattgagaactcttcagccatgattagacgttgactgcatctccctgatagaccaatcagctgtgtcgcacttaaactggagaagttacactgaagtataatcacactgaatgttagactttttcatctgccaaaaccaaaaaccattttgatctccctgtggttatcaatataacgcacaatcacaagtgtatgangacttanaaattaatcctttgtggtaggagttctgttgaatgatggaaatcttatactaccacaagactatttgatctggtaattggagacttcgggatttagagaactcctgtctgnattactctacnctgctaaggnggggnctgggtagttacttgctgnggaaaganaatgnngggnccccangccc

SEQ ID NO: 13946 - DNA, 686 bp, Homo sapiens
  misc_feature 536, 551, 571, 580, 601, 607, 625, 642, 649: n = A,T,C or G
tcagaaagacccaaaacctttattgtccctaccagggagccagtgcttccagcccacaccccacaccccaggagcttcagcaaggtctctgcttgggaggatgctgcccagaactgcagccagggccaccggtgccacctgcaggcttcctcccattccagctaggcagtggccaggctgccccctgaccagccccactgggaaggcagcaggatggcagtggccagtggggtcaggctgggccatctccctctcagacctcagcacctgggtcctcggggctgctgctcttgttccggaagtggtctcgactccgcttcctgctgccatggaagccaacagtttccaccggcgggagacctggcacagacccactgtggacagaccctgacagtgcctccacctcctgcaggcctccatgggggctgccccaactcctcagcctctgggctcccgggcccggccagatgggcagctccacagggcctcgccctgtctgtggcaggattccaaggccgccctgctggctttccaantttcccaggaacctnttctctgtgtttgctttgancctcgaatngtttgtgaaataacttccttnccaaantgaaggatttgtttaagngaaagcataattggggnagcagtntggagccagaagcaagggtgtgattttgttgctaatc

SEQ ID NO: 13947 - DNA, 271 bp, Homo sapiens
gcgaattgggtaccgggccccccctcgaggtcgacggtatcgataagcttgatatcgaattcctgcagcccgggggatccactagttctagagcggccgccaccgcggtggagctccagcttttgttccctttattgagggttaatttcgagcttggcgtaatcatggtcatagctgtttcaatcccctttttaaatgtacttagtgggatcaacaattaaacgtatcatgtagatatgcctagtgacactctgaaggtgccatttatata

SEQ ID NO: 13948 - DNA, 473 bp, Homo sapiens
tccaccgcggtggcggccgctctagaactagtggatcccccgggctgcaggaattcggcacgaggcgttgaagctattttatagaacctagctcttatagctggacaaaccatgtttcccatcttcccttcctctacttcccctggatttcttttttttaatttatttttttaattttttggagaaaagagtcttagtgtcgcccaggctggagtgcaatggtgcgatctctgctcactgcaacctccacttcctgggttcaagtgatcctcctgcctcagcctcccgagtagctgagatcacaggcatgcaccaccatgcatggctaatttttatatttttagtagagacggggtttcaccatgttggccaggccggtctcaaactcctgacctcaggtgacccacccactttggcctcccaaagggctgggattacaggagtgagccaccatgcctggccttttttgtttg

SEQ ID NO: 13949 - DNA, 610 bp, Homo sapiens
tcggcacgagcctgaacctctacgacacggccgggcaagaagactatgaccggctgcggcccctgtcctaccagaacacccacctcgtgctcatctgctatgacgtcatgaatcccaccagctacgacaacgtcctcatcaagtggttccctgaggtcacgcatttctgccgcgggatccccatggtgctcatcggctgcaagacagacctgaggaaggacaaggagcagctgcggaagctccgggccgcccagctggagcccatcacctacatgcagggcctgagcgcctgcgaacagatccgagctgctctctacctggaatgttccgccaagtttcgggagaatgtggaggacgtcttccgggaggccgccaaggtggctctcagcgctctgaagaaggcgcaacggcagaagaagcgccggctctgcctgctgctctgacccagggcagacagacctcacgacagcactgacagggcccgggggcccaggtgccgattgcaccagggaggctgccccatcccgaccctccagctcatggtgtctggggcctgcggctagactcttggaacattctggaactctctcctttcctggctggggctctg

SEQ ID NO: 13950 - DNA, 569 bp, Homo sapiens
  misc_feature 5, 363, 402, 438, 512, 519, 557, 563: n = A,T,C or G
gccgncaccgccaaaaaagtcaccgccgctagggtcgccgttgcatcggtgcagggcaagatggcatccgccacagactcgcgctatgggcagaaggagtcctcggatcagaacttcgactacatgttcaagattctcatcatcggcaacagcagcgtgggcaagacgtccttcctcttccgctatgctgacgactcgttcacgcctgccttcgtcagcaccgtgggcatcgacttcaaggtcaagaccatctatcgcaacgacaagaggatcaagctgcagatctgggacacagcagggcaagagcggtaccgggaccatcaccaccgcatactaccgggggcgccatgggtttcattcctnatgttttgacattcaccaacgagggattcctttcaatgncagttgcagggattggttccacccagtttcaagacntattcttgggggacatttgcccgggtgttggttggtagggaaacaagttttgacttgggagggttgagcgggtnggtgtcntcagaaacgttggccggcagttaggttggaccactttngggttngatttt

SEQ ID NO: 13951 - DNA, 586 bp, Homo sapiens
tcggcacgaggggccaacgccaagtaggggattgcgttccctccagtcgcagagtttccctcttgtcgcccaggctggagtgaagtggcacgatctcggcttactgcaagctccgcctcccgggttcacgccattctcctgcctcagcctcccgagtagctgggactacagaccctatcagatttggatatgtccttcatatttgattggatttacagtggtttcagcagtgtgctacagtttttaggattatataagaaaactggtaaactggtatttcttggattggataatgcaggaaaaacaacattgctacacatgttaaaagatgacagacttggacaacatgtcccaacattacatcccacttccgaagaactgaccattgctggcatgacgtttacaacttttgatctgggtggacatgttcaagctcgaagagtgtggaaaaactaccttcctgctatcaatggcattgtatttctggtggattgtgcagaccacgaaaggctgttagagtcaaaagaagaacttgattcactaatgacagatgaaaccattgctaatgtgcctatactgattcttg

SEQ ID NO: 13952 - DNA, 573 bp, Homo sapiens
caagctacttgttctttttgcaggatcccatcgattcgaattccgttgctgtcggacagattgccctagtacccacccacctatcagggttatgcaatggaacatcctcgcccaagctcttggagaaggcaaagacaactttgtacagtgccctgttgaagcactcaaatgggaagaaaggaaatgtctcatcctggaagaaatcctggcctaccagcctgatatattgtgcctccaagaggtggaccactattttgacaccttccagccactcctcagtagactaggctatcaaggcacgtttttccccaaaccctggtcaccttgtctagatgtagaacacaacaatggaccagatggttgtgccttattttttcttcaaaaccgattcaagctagtcaacagtgccaatattaggctgacagccatgacattgaaaaccaaccaggtggccattgcacagaccctggagtgcaaggagtcaggccgacagttctgcatcgctgttacccatctaaaagcacgcactggctgggagcggtttcgatcagctcaaggctgtgacctccttca

SEQ ID NO: 13953 - DNA, 770 bp, Homo sapiens
  misc_feature 3, 7, 9, 12, 353, 425, 531, 608, 637, 647, 652, 687, 698,703, 716, 723, 729, 734, 747, 758, 769: n = A,T,C or G
ttnaaancngcnttggactccttgcaggatcccatcgattcgtttaaactgagctccaaatgacgttcaaacacccctctcgggtagagttttcatggtggaacggttgcgcccaccaaacagaagcttatgtttttggcacagaagcctgggccattttcatggacacctggctggacctcggtggaagtgaactccgtaggttgttgcgttcactgcagcacctcacatgataccgtcccctctcatggaacggagcctcccccatgcagcccccactcaaatggagttttaaaggctgggttcaggttacgggggcgtttctcaccgtctgaatgcggaggacagagacnagctccagggagcgtgggcgggtgacggcgctgagatgcgtgatgtctcggaaacgtcctcgcatccctcancgcgggcgctgactgccgcggcccttgcctgtcttcaggagcgctccagcttcgcccacacaccccgggctgatgtcccctcgctccggcggcctgcagaccccanagtgcctgtctcgggagggctccccattcacacgaccctgagtttgggtccaagttagcttctgtcccaaagtaccngtattcccaaagcgcacccggtaaagganccgggccggnccttntttgcggggccgggggccggggccgggaactcgtngggggttgccnggaanggggttaaccgtnccggttnttccgnccttncgtgcaaggcttnccccgttaagnggcccaaaccnt

SEQ ID NO: 13954 - DNA, 573 bp, Homo sapiens
acaaaagctggagctccaccgcggtggcggccgctctagaactagtggatcccccgggctgcaggaattcggcacgagcctggctgcaatctgactttttatgggaaatctcccaatgattaaatgatggcaactaacaacaacaaaaccactgtgggcaaaacaaaatgcttctgcagactcaatttgttttatgagcaggtggtttggaaccctagacccagagggttatattgataagggttctagggtgtcctttagaatccattacgatcctctaaagagtgtgcccctaacctgtgctgggctctgagggcacaacgggggtctggggcatggcccctgccctcaaggctgtatcatagctgccctcaagctagatgggtcaaatcagttatgcacccagagccaacttacaacaaaaggactaggtgctatagagctcagaggagggagaggtcagggaatggaggaggccatgtgaaaaggcctcctggagattctgggccttgtgttggttctcagacaggagggtaagacttagtacaaccaaagaaggtaaggggcatcctg

SEQ ID NO: 13955 - DNA, 680 bp, Homo sapiens
tacgccaactcgaattaaccctcactaaagggaacaaaagctggagctccaccgcggtggcggccgctctagaactagtggatcccccgggctgcaggaattcggcacgaggtttttaaagcagagctgagcacacactggatgcgtttgaatgtgtttgtgtagtttgttgtgaaattgttacatttagcaggcagatccagaagcactagtgaactgtcatcttggtggggttggcttaaatttaattgactgtttagattccatttcttaattgattggccagtatgaaaagatgccagtgcaagtaaccatagtatcaaaaaagttaaaaattattcaaagctatagtttatacatcaggtactgccatttactgtaaaccacctgcaagaaagtcaggaacaactaaattcacaagaactgtcctgctaagaagtgtattaaagatttccattttgttttactaattgggaacatcttaatgtttaatatttaaactattggtatcatttttctaatgtataatttgtattactgggatcaagtatgtacagtggtgatgctagtagaagtttaagccttggaaataccactttcatattttcagatgtcatggatttaatgagtaatttatgtttttaaaattcagaatagttaatctctgatctaaaaccatc

SEQ ID NO: 13956 - DNA, 704 bp, Homo sapiens
ttctttttttgaattttaaagtttatttactttgaagtaaccaacttaaaaaatggcctgagttaagtgtattaaaaagaagaaatagtcgtaagatggcagtataaattcatctctgcatgtagaaaccggaaaaaaagcaagttcagtacttcaccaaaaaatttcaacattgcaaacacaggaaattgagaactgacaaacagaaatactaggaaatgcaaagtcttgaagctccaaaacaaaaacagcaatcttggaaaggcccctaatctaccttctcaatggttgggggctgtacccagaaccctccctttggaccctgagccccgaagcccccaggcccgggaccaccggcaccctggtacagtccgctgatgatggggttacacacctgctccagctccttcctcttgtgctcaaactcgtccttctcggccaaggtgttggcgtccagctacgagatgacctcttgacacttgtccagcaccttcttcttgtcggcctcgctgatcttgcccttgagcccctcatcctccacggcgctcttcatgttgaaggcgtaggactccagggcgttcttggctgacaccctctcgcggtgcacctcgtcctcggccttgtacttctccgcctcctgcacatgcggctgatctcctccttgctcaggcggcccttgtcgttggtgatggtgatcttgttgg

SEQ ID NO: 13957 - DNA, 601 bp, Homo sapiens
tcggcacgaggggaaggccatggaggcactggccacagccgagcaggcctgcaaggagaagctgcactccctgacccaggccaaggaggaatcggagaagcagctctgtctgattgaggcgcagaccgtggaggccctgctggctctgctcccagaactctctgtcttggcacaacagaattacaccgagtggctgcaggatctcaaagagaaaggccccacgctgctgaagcacccgccagctcccgcggagccctcctcggacctggcctccaagttgagggaggccgaggagacgcagagcacactgcaggccgagtgtgaccagtaccgcagcatcctggcggagacggagggcatgctcagagacctgcagaagagcgtggaggaggaggagcaggtgtggagggccaaggtgggcgccgcagaggaggagctccagaagtcccgggtcacagtgaagcatctcgaagagattgtagagaagctaaaaggagaacttgaaagttcggaccaggtgagggagcacacgtcgcatttggaggcagagctggaaaagcacatggcggccgcaagcttattccctttagtgagggttaat

SEQ ID NO: 13958 - DNA, 280 bp, Homo sapiens
atattttatttaatgtagtctcactctgttgccctggctggactgcagtggcatgatctcatctcactgcaacctctgcctcctgggttaaatcgatttctggctaatttttgaattcttattaaagatggggtttcaccatgttggccaagctgctctcaaactcctgacctcaagtgatccacccgccttggcctcccacaactgctacgattacaagtgtgatccaccgggcctggccaaattgcttcattttttatttctccatacttcctacata

SEQ ID NO: 13959 - DNA, 512 bp, Homo sapiens
  misc_feature 7, 13, 16, 20, 41: n = A,T,C or G
cgacagnaggggnagnaggnagccacttacggggcctcagnaatactgagttgaaggaaaagggcctttctctacctgccactaatgagactaaagttgttataaatatgtgccttatgatgaaaggggacaaccttatgatacagaattaacgctcacctcttgcatataaaaccagaatgaattgtgaaacaaatctctaaatgtaggcttctctttaaatcagatttactcaggccgggcgtggtggctcacgcctgtaatcccagcactttgggaggctgagacaggtggatcacctgaggtcaggagttcaagaccatcctagccagcatgatgaaaccccatcgctactaaaattcaaaaatcagctgggcgtggtggtgcacacctgtaatcccagctgctgcagaggctgaggcaggagaattgctcgatcccaggaggtagaggttgcagtgaacagagatcgtgctactgcgctcctgggtgacagagtgagactccatctc

SEQ ID NO: 13960 - DNA, 743 bp, Homo sapiens
  misc_feature 1, 3, 4, 11, 28, 183, 635, 640, 678, 685, 694, 707: n = A,T,C or G
ntnnggagggnagcgtgacacgcccttnccttgaggaccatgaaccgcagccgccaggtgacgtgcgtggcctgggtccgctgcggcgtggccaaagagacaccagacaaggtagagctgagtaaagaagaagtaaaacgcctcattgctgaggcaaaggagaaattgcaagaagaaggtggnggcagtgatgaagaggagacaggcagtccttcagaagatgacatgcagagtgcacgcacccaggcacgcccaagagagcccctggaggatggtgacccagaggatgacaggacgcttgatgatgatgagctggctgagtacgacttagataaatatgatgaggaaggtgacccagatgctgagactcttggtgaatctctcttgggtcttacggtctacgggagtaatgatcaagatccttacgttactctgaaagatacagaacaatatgaacgtgaagatttcttgattaagcccagtgataatcttatagtttgtggccgagctgaacaggaccagtgcaatttagaggtgcatgtttataatcaagaagaagactctttttatgtacaccatgatatactcttgtctgcatatcctctgagtgtggaatggctgaattttgatcctancccanatgattctactggaattactttgctgtaggaacatganccctgtnttgaagtgnggaccttgattantggctcttaaagccatcttccctcggagtaacttct

SEQ ID NO: 13961 - DNA, 473 bp, Homo sapiens
cacaaacatccagagtttattgctcttcaccatggaaaaaaagtctcttcccgatgggtatttacaaagcggggagatggagtgtgaaattaaccagtgttgaaatcgtaccacccattcacatcttcaggacagtggcaggaacagcgccgtatgcttgagggtgctgtggtcacagctcgcggccccggccaccgaggcccagttcccttccagtagtgggcagctcagtgaggctggatagaaagtctgggcaggcagtgggtatgcaattgaagcaagaagagaaaggagatgttcagagaaccaaaggcgcccttgtgaaggttccatctgtctcacaggaggttctgaccgacagctgtgggctccagattgtaccgcactcccatctcagctctgggccagcctggctccactcagctcatccaggctaccttcccttgctcaaaacccacctcgtggatgtggga

SEQ ID NO: 13962 - DNA, 415 bp, Homo sapiens
  misc_feature 310: n = A,T,C or G
tccaccgcggtggcggccgctctagactagtggatcccccgggctgcaggtcgtcgccgacgatcccttcgcgcctgtactccttgctgttccgcaaaacttccacctttgccctcaccatcgcagtgggcgccctgttcttcgagcgagccttcgatcatggcgcagacgcgatctacgagcacatcaacgatgggaaactgtggaaacatataaagcacaagtatgagaacaacgagtaacaccctgcccctgtgggacccgaaggaacagtcgccggtcagctgtttgcctggagttggggcctcancctaaggatgagtttcaagttgccgttcaccgaccgccagtgtgtgggcaagctatggctccactgtacaaacagactcacttctgctgtgtttgagtacagctg

SEQ ID NO: 13963 - DNA, 489 bp, Homo sapiens
tggactccaccgcggtggcggccgctctagaactagtggatcccccgggctgcaggaattcggcacgagagcttgtctgccatccccaaattatgtggtcgctgaccggaccgaatgtttcatcactggctggggagaaacccaaggtacttttggagctggccttctcaaggaagcccagctccctgtgattgagaataaagtgtgcaatcgctatgagtttctgaatggaagagtccaatccaccgaactctgtgctgggcatttggccggaggcactgacagttgccagggtgacagtggaggtcctctggtttgcttcgagaaggacaaatacattttacaaggagtcacttcttggggtcttggctgtgcacgccccaataagcctggtgtctatgttcgtgtttcaaggtttgttacttggattgagggagtgatgagaaataattaattggacgggagacagagtgacgcactgactcacct

SEQ ID NO: 13964 - DNA, 584 bp, Homo sapiens
aacgggattcagggtcagacggtgaggatgatgtaaatgagcaacactccggatcagacactggaagtgtagaacgtcattcagagaatgaaactagtgatcgagaagatggcctccccaaaggacatcatgtgacagactctgagaacgatgagcccttaaatcttaatgctagtgactctgaaagtgaggagcttcacaggcaaaaggacagcgactctgaatctgaggaacgtgcagagcctcctgcaagcgattctgaaaatgaggatgtcaatcagcatgggagcgactctgagagtgaagagaccaggaaattacctggtagtgactctgaaaatgaggaacttcttaatgggcatgcaagtgactcagaaaacgaagatgttgggaagcatcccgccagtgattctgagattgaggagctccagaagagtcctgctagtgactctgaaacagaagatgctctaaaacctcaaatcagtgactctgagagtgaggaacccccaaggcaccaagccagtgactccgaaaatgaggagcctcccaacctcgaatgagtgattctgaaagtgatgagcttc

SEQ ID NO: 13965 - DNA, 794 bp, Homo sapiens
  misc_feature 2, 13, 14, 15, 19, 22, 25, 26, 33, 44, 46, 53, 63, 73, 85,650, 670, 674, 699, 715, 716, 721, 726, 728, 729, 747, 759,761, 764, 766, 772, 791, 792: n = A,T,C or G
anttacttgggtnnnaaanccnctnntttgttncttttggccgnancggcctncggctgcganagtagacagnagggacactagnatatgaactctacccagtatcagtaaaccaataaaaatgttttgctttataaaatgctgtgttgcttggcagcttcaaagtcagcattgactgttacggatcttggtctaagttaaaagattagtggcttccagtagaaaatgaaaattgctttacaaatacaaatgggttctgttaataatacagagaaaagctaaatgttattttagcatccagtcttcatacttcatttatggtataaaattttttatttattcttttaataactttttaaatagtaatctcattttaaacataaactgaggaccagaatattaagcagtgttcatcaagatcgtacagtttaatagatttgaaccaggtaaagccaagattcaatattaggtctgacaaaaagctttttcaacaaagtaactctgcttcttttctactgttcatttaaaacaaaacagataaacagaccagctatcatttgggatgggagagcagaaaatttgaggaaagtaaactcaaatgtgtaaatactctaatattatgctgaaaatagatcgctttatttttctangtgaatacagagtgagttgntcantatacagatgtttaattgggactanttaggattatgacctnnaaaanaatantnnaatgcctttcaggagccnggcccggggctncnccngnatcccncttttgggaaccaggcggnnat

SEQ ID NO: 13966 - DNA, 752 bp, Homo sapiens
  misc_feature 549, 683, 704, 716, 719, 723, 728, 729, 734, 735, 736, 737,738, 741, 742, 743, 744, 745, 749: n = A,T,C or G
gggggacactactcccagctcctggctgacttctagtcttctggttgaagctgcgcctttagatgacacgaccctacccacccctgtttccagcggatgcccgggcctggagcccacagaattcttccagtccctgggtggggacggagaaaggaacgttcagattgagatggcccatggcaccaccacgctcgccttcaagttccagcatggagtgattgcagcagtggattctcgggcctcagctgggtcctacattagtgccttacgggtgaacaaggtgattgagattaacccttacctgcttggcaccatgtctggctgtgcagcagactgtcagtactgggagcgcctgctggccaaggaatgcaggctgtactatctgcgaaatggagaacgtatttcagtgtcggcagcctccaagctgctgtccaacatgatgtgccagtaccggggcatgggcctctctatgggcagtatgatctgtggctgggataagaaagggtcctggactctactacgtggatgaacatgggactcggctctcangaaatatgttctccacggggtagtgggaacacttatgcctacggggtcatggacagtggctatcggcctaatcttaccctgaaaagcctatgaccttggccgaaggcttttgttatgccctcacaaaacagctntctggaggcgttgcatttgtncaatgaagaaanggntggngaaannaaaannnnnatnnnnnaccngtg

SEQ ID NO: 13967 - DNA, 417 bp, Homo sapiens
tatgacgtcgcatgcacgcgtacgtaagcttggatcctctagagcggccgcctactactactaaattcgcggccgcgtagaccaacaacaaaattatgtgcctttgcaacaacatggtaagaagctagaggccatgatctaagtgaattaacacaggaacagaaaaccaaatactgcatgttctcacttataagggggagctaaacattgagtacacatggacatgaagatggcaacaatagacactgtagcctacttgaaggtggagggtaggtggaacgtaaggattgaaaaactgcctattggctcaatacctgggtgacaaaatcatttgtacatcaaagcccagcgacatgcaaattactcatgtaacaaacctgcataggtactccctgaatctaaaataaaagttagaag

SEQ ID NO: 13968 - DNA, 481 bp, Homo sapiens
tttgtacaaaaaagcaggctggtaccggtccggaattcccgggatatcgtcgacccacgcgtccgctgttgaattcagtttgcttatgttttgttgagatttttttgcatctatgttcatcaaggatattggtcagtagttttcttttcttgtagtgtctttgtctgcttcggtatcagggtaatgctggccttgtaaaatgagtttggaagtgttctctaacttttcggaagagtttgaaaaggattggtgttagttctttttttaaatgcttggtcatctggttctgggctttttgttgttgtttttggaagatttttaatgactgtttcaatcttcttcctagttataggtctattcagattttctatttcttcatgattcaatcttattagcttgtacatgtctaggaatttatacatttcttccaggtcatctaatttgttgaggtacaattgttcatagtagtttattatgatcc

SEQ ID NO: 13969 - DNA, 670 bp, Homo sapiens
gacactatagaacaagtttgtacaaaaaagcggctggtaccggtccggaattcccgggatatcgtcgacccacgcgtccgcccacgcgtccgagaaattctatgaggcattctctaaaaatctcaagcttggaatccacgaagactccactaaccgccgccgcctgtctgagctgctgcgctatcatacctcccagtctggagatgagatgacatctctgtcagagtatgtttctcgcatgaaggagacacagaagtccatctattacatcactggtgagagcaaagagcaggtggccaactcagcttttgtggagcgagtgcggaaacggggcttcgaggtggtatatatgaccgagcccattgacgagtactgtgtgcagcagctcaaggaatttgatgggaagagcctggtctcagttaccaaggagggtctggagctgcctgaggatgaggaggagaagaagaagatggaagagagcaaggcaaagtttgagaacctctgcaagctcatgaaagaaatcttagataagaaggttgagaaggtgacaatctccaatagacttgtgtcttcaccttgctgcattgtgaccagcacctacggctggacagccaatatggagcggatcatgaaagcccaggcacttcgggacaactccaccatgggctat

SEQ ID NO: 13970 - DNA, 567 bp, Homo sapiens
tgacactatagaacaagtttgtacaaaaaagcaggctggtaccggtccggaattcccgggatatcgtcgacccacgcgtccgaaaatattcccatgaattatgtccagttcttcttggaaaaaaatttggttttgaatgaacctgcaaagcatcctgcagcgtgagcagctcctccacctggagctccgaagcatcttctcaggccaaagcggcattacccgtgaatctgtcttctccgccacagcatggtttgaggcgcagtctgttaatatagctgggccatgtcagtgactgttgtgtttgtggggtcaggtggggggcatggtatttgcaaaaaaaacaaattatggctaatttattattttgttgcagtggggttaactgtaaactcatgtaagagtctgtgatttcctcattggttgatctctctctctgtaatcctcattgcaaattttcaccaggacagcgttttttgattagaggggagctctggcacagtatgctttaatttagcaggaacttccagatgatttaaattctcgatgctgtgatgacacacatatgat

SEQ ID NO: 13971 - DNA, 138 bp, Homo sapiens
cagtgtatggaggaatggtaagtactttacagctgttgtacagggcagcatgtcctgaaaggggctgcaagaaatgctgattccaagggatgtgtgccagttctctgggggaggaagaaaggctctgtagcagaaaga

SEQ ID NO: 13972 - DNA, 483 bp, Homo sapiens
tcggcacgagggttttcatgaccaagttttttacatcagatttattattttggacccttaaaggaatataaattgcaagagagattttgatcagtgtaagaattactagatggccttatttatttccttctttattattgtacttcttatcttttattaatgttttctttctctaagatatatttgaaagccaggcatggtgacacacccctgtagttccagctactcaggacactgaggcaggaggattgtttgagctcatgggttcgaggctatgtagtacataatcacacctatgactagccactgcattccagcctgggtaacatagcgagcccctgtctcttaaaaaacaaaagatgtggccaggcatggtggctcacacctgtaatcccagcactttgggaggctgaggtgggcggatcacttgaggtcaggggttcaagaccagcctggacaacatggtaaaaccctgtatctaca

SEQ ID NO: 13973 - DNA, 304 bp, Homo sapiens
aagcttgcggccgtctgcgcggcgccgccccgtggtcggatcctgggcggcagagaggccgaggcgcacgcgcggccctacatggcgtcggtgcagctgaacggcgcgcacctgtgcggcggcgtcctggtggcggagcagtgggtgctgagcgcggcgcactgcctggaggacgcggccgacgggaaggtgcaggttctcctgggcgcgcactccctgtcgcagccggagccctccaagcgcctgtacgacgtgctccgcgcagtgccccacccggacagccagcccgacaccatcgaccacg

SEQ ID NO: 13974 - DNA, 133 bp, Homo sapiens
catctcccagcccctatggtttcacatagacgtgcagtgtgaaccaaagcaagactgaatgtgactgtaaataattctgttcatcatttcactccgtgcagttctctgaattgagagatgcacctcttaaacc

SEQ ID NO: 13975 - DNA, 638 bp, Homo sapiens
gtacaacataaataacaaaggtgctaatttcaaagacaggtttcaaacaatgagaataagaatatattatttcatatcaggcaataataaccttagcccaaatacttttaacatctaaagtgcattaattgacttccttaggaattttcctaaggaccaaaggtagatacaaatggcctattttaaatagtaatattactccatgttcacagacacttaaaggcaatcactattcaacatacaattgtggaaattactgatttttagttctcagaattagagttccctttgtttttcctcccaggcaaaggaaagcttgatttgctctggggttgagaaagtttactggctaataaagtgaatggttcaatcagagttttccgatctgtaacagtcacctcccacagtcttactttctcactttttgcccactgctgtgccacttcagcgtccacttgtctctgctcagaaaggtcgattttgtttcctaataccacaattgctacctcttttttgtctttgaacttatcgatttctttcttcagaagctccactctttgaaaggattcaaggttattcacactgtacacaagaacgaagccatcagcaaatgaaaaataatgctttggcagctccaa

SEQ ID NO: 13976 - DNA, 474 bp, Homo sapiens
agtctcgaaaggcactctgtcacgtgtacacaggaaagggccctgacaagaggatgggactgcagttgtggctgccagagtcttgctttgtcgcccaggttggagtgcagtggcacgatctcggctcagtgcaacctccgcctcctgagttcaagtgattctcctgcctcagcctccctagtagctgggattacaggacaaggagagggacaaattccttcttggcatccttatggccctgtgacctgctaatgaatgctgactctgagctgctactagaatttggtttccttgtggcttcccaggaattggtctcactctgctcactctgtctcccaagctggagtgcagtggtacagtcacggctcactgcagcctccacttcctggactcaagtgatcttctcacttcagccttctgagtagctgggactacagccccctctgcagctcttcatgggggtccactcaagtc

SEQ ID NO: 13977 - DNA, 495 bp, Homo sapiens
  misc_feature 357: n = A,T,C or G
tacgcctgcaggtaccggtccggaattcccgggtcgacccacgcgtccgatttagaactgaacacgcctcacactagccacaagacccagaccaataactcccttgccctctctgggcctcagtgactttgcctcaaggtagttgtgaggaaggtgagcaaaacagggaaagagtcaccaatggatttggatttttaagatattgaaatcccaggcacaggcgcggtggctcacgcctgtaatcccaacactttgggaggccaaggcaggcggatcacaaggtcaggagatcgagaccatcctggctaaaacggtgaaaccccgtctctactaaaaatacaaaaaaattagccgggncgtggtggcgggcacctgtagtcccagctactctggaggctgagacaggagaatggcttgaacccgggaggcagaggttgcagtgaaccgagattgtgccattgcactccaacctggttgacaagagcaagacttcat

SEQ ID NO: 13978 - DNA, 364 bp, Homo sapiens
taatacgactcactatagggaatttggccctcgaggccaagaattcggcacgaggtttgctgcgctgaacctgtacacagacatcatgaacatcttcctgtacatcctcaccatcattggccgagccaaggagtatccgagctccagctcgctgtgcccgctcaggtggcacggctggcctggaccctgcccctggcacggcagagccagctgaacttcccctctctcttgttcccaggcacaggctagggaaaaggatgcctctctccaaccctcctgtatgtacactgcacatacttccatttggacccgctgtggccacagcatggaccctttagtcctcccgcccccgccaaggggcacc

SEQ ID NO: 13979 - DNA, 669 bp, Homo sapiens
acgccagctcgaattaaccctcactaaagggaacaaaagctggagctccaccgcggtggcggccgctctagaactagtggatcccccgggctgcaggaattcggcacgagtcccaccccatttagcccgtgggattcttggatcattgaacagcgatggggtcctcaaaatgaagagagttgacttctgccaaaaggcatgtgatgctcaagtgattaatttgaaaaacaaaagtaacatctacagaggagtaaacattccaggggtgcctgcatttgacagatctgttccctggggtgaatgtttaatctagagtgtgggaaggagctattcctccatagtatcagcattcctccttactttgctatgtcctccctaacactctcattcccatctttgctgttgtttcaatcaataacaaaagaggccaggcgcggtggctcacgcctctaatcccagcacgttgggaggccgaggcaggcggatcacctcaggtcaggagtttgagaccagcttgagcaacatggcaaaaccccgtctctattaaaaatataaaaaattagccaggcatggtggtgggggcctgtaatacaagctacttgggagactgaggtgggagaatggcttgaacccaggaggtggaggttgcagtgagctgagatcgcgccg

SEQ ID NO: 13980 - DNA, 512 bp, Homo sapiens
tggtacgcctgcaggtaccggtccggaattcccgggtcgactactactactaaattcgcggccgcgtcgacagatgctgaagctggacaaggagaacgccatcgaccgcgccgagcaggccgaagccgacaagaagcaagctgaggaccgctgcaagcagctggaggaggagcagcaggccctccagaagaagctgaaggggacagaggatgaggtggaaaagtattctgaatccgtgaaggaggcccaggagaaactggagcaggccgagaagaaggccactgatgctgaggcagatgtggcctccctgaaccgccgcattcagctggttgaggaggagctggaccgggcccaggagcgcctggctacagccctgcagaagctggaggaggccgagaaggcggctgatgagagcgagagaggaatgaaggtcatcgaaaaccgggccatgaaggatgaggagaagatggaactgcaggagatgcagctgaaggaggccaagcacatcgctg

SEQ ID NO: 13981 - DNA, 280 bp, Homo sapiens
atattttatttaatgtaccctcactctgttgccctggctggactgcagtggcatgatctcatctcactgcaacctctgcctcctgggttaaagcgatttctggctaatttttgaattcttattaaagatggggtttcaccatgttggccaagctgctctcaaactcctgacctcaagtgatccacccgccttggcctcccacaactgctacgattacaggtgtgatccaccgtgcctggccaaattgcttcattttttatttctccatacttcctacata

SEQ ID NO: 13982 - DNA, 681 bp, Homo sapiens
  misc_feature 617: n = A,T,C or G
agagcaacatgcccaagttttattgtgactactgcgatacatacctcacccatgactctccatctgtgagaaagacacactgcagtggaaggaaacacaaagagaatgtgaaagactattatcagaaatggatggaagagcaggctcagagcctgattgacaaaacaacggctgcatttcaacaaggaaagatacctcctactccattctctgctcctcctcctgcaggggcgatgataccacctccccccagccttccgggtcctcctcgccctggtatgatgccagcaccccatatggggggccctcccatgatgccaatgatgggccctcctcctcctgggatgatgccagtgggacctgctcctggaatgaggccgcccatgggaggccatatgccaatgatgcctgggcccccaatgatgagacctcctgcccgtcccatgatggtgcccactcggcccggaatgactcgaccagacagataaggatagaggggaggccttattgtatcggttttatattacctgttctgcttcaccaggagatcatgctgctgtgatactgagttttctaaacagcataaggaagacttgctcccctgtcctatgaaaganaatagttttggagggggagaagtgggacaaaaagatgcagttttcctttgtattgggaaattgc

SEQ ID NO: 13983 - DNA, 689 bp, Homo sapiens
  misc_feature 5, 181, 214, 219, 223, 257, 279, 297, 298, 307, 309, 312,320, 350, 391, 397, 448, 461, 474, 485, 511, 537, 544, 578,630, 648, 657, 672, 674, 680, 684, 685, 688, 689: n = A,T,C or G
acagnaggggagcattctgttttttgatattgagtattttataaatcctttattcttctgcactataatttctgacaatcctcccgagcttttgaggctataggattacttgtgtctgtgatttcttgtgtcacagatttctgtgattgggagagcggactactgtttttttttttttganacagggcctcaatcccattgcccaggctagggngcaanggcncaaactcggttcactgcatccttaacctccctgngctcaggcaatcctcccacctnagcctcccaagtagctgnnactataggngngcnccaccacncctggctaatttttcaaatttttggtaaanacggggttttgccatgttgcccaggctggtctcaaactccngggctnaagcaagccacctgcctttgcctcccaaagggctgggattacagggatganccaccatgcccancctctgtttactntttttaactgnaagctgttgcataaaactgctggcanaagttccccatattcccattctattngccccanccatttatattttctgcttctaacataaaataanctggggatgggggaagcataaaaaaccaaaatccaagtttattggatttgtntgcaaactaaaaaaaaancctctgagngagggcctgcttctntntcccanttcnnacnn

SEQ ID NO: 13984 - DNA, 766 bp, Homo sapiens
  misc_feature 1, 8, 191, 192, 219, 312, 327, 374, 392, 428, 459, 477, 521,530, 556, 562, 582, 589, 598, 613, 619, 625, 637, 639, 645,654, 662, 663, 685, 691, 711, 718, 721, 728, 735, 736, 748: n = A,T,C or G
nggcaggnaatggcagtgcgtattttctggctgaaaagtaaagcatgtatccaccgctttctcatagcctcgaaacatggagaaaagcaacttgcttttgccttggcaagcatgctaacctaagttaattcaagttttttttaacttaccctttccttcactggaagatttttccataagagaattccatnntgtttcaaaaaaataattatagggggncccttccaagttctttgaaagattcataaccaactattcactattataacatgtttcccagtgtaaatgagtaaggaaaaaaaagtgtaacangtgcgtgcagatgangagtgaccctcatatttaagttattttatattttgactggacattgntcaaaaaggtgctttaanggacacttgttggttgtctgcccagcatctttcaanaatatccctcctggcctccacatgggttggngcagggccatgtgtgaanacagcatgagtcttaacccctcttttatttttattttttgaaanaaagcctcnctctttttgccaagctggaatgctgnggcccnattttggttactggaacctnccctccnggttcaagnattctcctgcctcanctgccngtactngaattccagggngncccccntgcccactngttttttnntttttataaaaaagggttactntttgcnagctggctgaacccgacccngggaccnccncccaccnccaaagnngggtaaagggtnaccctggccggcttaccc

SEQ ID NO: 13985 - DNA, 505 bp, Homo sapiens
  misc_feature 413, 443, 505: n = A,T,C or G
attgactcagcaatgcagggctggcacccatcagcttcaaaccacatcttatcgcatccactcctgtccactcccgtccactttgccctcttccaggctgaaatcttgctttcaggcaagggcttccggccagccttgcattagttctcagctatggtcttctgaacccagtcctggatggaagtcaccttcacatacacaccatactcagccacagcacagctcttatcaaagcttaagatcccagtcgcataccaggtgtcctcctccaggtcgtgaacggcaaaggcactgcccgcatcgccatagcaggtgtcttcttggtacttagacatgccagcacagaaggtgtgttcattcagtatggggctgcacccctacagggctcttcggtgtcttcttttcggggactntgctgccttcataatgccttatgcattggncttgggtcagccacaggaggcattgacatacttcagatggtcagtaaatttaaaattgggcn

SEQ ID NO: 13986 - DNA, 657 bp, Homo sapiens
gtttgtttaattttgtattttaataaaagcaaatgcaatgtaacaaaagcgtgttgaagcatatcatggtttaacttactgctcccaccacaaaatattttgtcttttacttatcgtttcagaaatcagtaccattaaagccttaaacagaaaactaattccaatctgaaaaaggtacaaaaaggcacataaaatcccagtgcttctgtactgtaaaattcaagtgtaactgagctcagtgtttttccaaacagtatggatcactgatattccctctgagcccaaattggtttgcagcctatgccaaagcctccagcaagcactgtgctagtagactacaaagttaaagcctagcttctgaatgctttttgggaatatcagttgaaattgtttgtacttgtccaaaaaccaagttcaccctgaagttcagtcatcacctccaccatacatgtcagaaagtttcttgaaccgtggcccccagtcgttcaggtaatcatagtcctgctcaccaccactacttgaggaattaagggagctcaaggacccagcagtggagccactgccttcatagtcaaacactaacagggagtcatatggtggagctgtggggtcatttgcagccgctttaaggccctcattaatgaagtccccaatgtc

SEQ ID NO: 13987 - DNA, 412 bp, Homo sapiens
  misc_feature 231, 250, 262, 268, 321, 336, 344, 356, 365: n = A,T,C or G
accccaacttggaggacacctacagctccgaggagactgtggaccaccagcctgtccacctgagggtcatggacactgcagacctggacacccccaggaactgcgagcgctacctgaactgggcccatcccttcctggtggtgtacagcgtcgacagccgccagagctttgatagcagcagcagctacctgggagctgctttgccttgcacgcgaaggagacacagcgcanattccctgccctgctgctnggcaacaagctngacatnggttcagtacaaggcaagtcaccaaggcagagggtgttgcttttggaaggcangttttggggtgcctntttttttngaagtttttttncctgttttnggaatttttaagcaagttgcagcatgttttttccacgaaggcaattt

SEQ ID NO: 13988 - DNA, 461 bp, Homo sapiens
tatgacgtcgcatgcacgcgtacgtaagcttggatcctctagagcggccgcctactactactaaattcgcggccgcgtcgacggtatacctgtgtgacaactggggaggacactttccttgtgccctcaaatcagttgtccctccagatgagaagcactggaatgatctggctttggaatttcactatatgaggtctctgccgaagcatgagcgattggtggatctccatggttcagtcattgactacaactatggtggtggctccagcattgctgtgctcctcattatggagcggctacaccgggatctctacacagggctgaaggctgggctgaccctggaggtcgacgcggccgcgaatttagtagtagtagagtcgacccgggaattccggaccggtacctgcaggcgtaccagctttccctatagtgagtcgtattagagcttggcgtaatcatgg

SEQ ID NO: 13989 - DNA, 452 bp, Homo sapiens
tggtacgcctgcaggtaccggtccggaattcccgggtcgactactactactaaattcgccgccgcgtcgacgtcgatcaactctaggctccaactcgttatgaaaagtgggaagtacgtcctggggtacaagcagactctgaagatgatcagacaaggcaaagcgaaattggtcattctcgctaacaactgcccagctttgaggaaatctgaaatagagtaccatgctatgttggctaaaactggtgtccatcactacagtggcaataatattgaactgggcacagcatgcggaaaatactacagagtgtgcacactggctatcattgatccaggtgactctgacatcattagaagcatgccagaacagactggtgaaaagtaaaccttttcacctacaaaatttcacctgcaaaccttaaacctgcaaaattttcctttaataaaatttgc

SEQ ID NO: 13990 - DNA, 658 bp, Homo sapiens
tccaccgcggtggcggccgctctagactagtggatcccccgggctgcaggaattcggcacgaggcggaaggtctggagtgggtggggcggagtgggagggacgcctagagatggcaggaggaagacctgggcgctcttaaccacccccaacgcccttgtctgcatgtctttttctctgtctcctccttttctgtttcttctcccagacaggtgaagaaacaagaaaactaagaaatccgagcggttggagggggagtctgtgtggatgggatggggacgccgggggaggggctgggccgctgctcccatgccctgatccggggagtcccagagagcctggcgtcgggggaaggtgcgggggctggccttcccgctctggatctggccaaagctcaaagggagcacggggtgctgggaggtaaactgaggcaacgactggggctacagctgctagaactgccacctgaggagtcattgccgctgggaccgctgcttggcgacacggccgtgatccaaggggacacggccctaatcacgcggccctggagccccgctcgtaggccagaggtcgatggagtccgcaaagccctgcaagacctggggctccgaattgtggaaataggagacgagaacgcgacgctggatggcactgacgttc

SEQ ID NO: 13991 - DNA, 599 bp, Homo sapiens
ataaatggatgttgctcctttgtatttttagcttccctatttgcttaaaagtacaggctccctaagagaggatggagagggagagactgaattgttagtaggtctaaacatcaaagaaaacatttttattagttacttatggaaaatcatctattacaatgataaccttcaagtgacttccattatggctggacaggcggtgagctcagtggattgcagtggtgtgctggtgattttgcacagtgagctctgcggaaggggtcaggctcaactgctgatgtgtctcacacgtagcagacaaggggtgtctgactggcttcttttgcctcaagatggtgtatgtcgtaagtgatgcaatcagctgtctgctttttaaggttgggattgtgctgactttgggattaacatgagcttctttagcaaccaagcatgaacttgattaagaccagaagtttgggagatgagtcctggcattatgtctaggactaaagcagtggctttgtatagcaagctgagtaaaggttgacatattccaaaacccttctttttaaaatgaaaaaggatggagagaaggatggaaagcctggacttaaaccttt

SEQ ID NO: 13992 - DNA, 192 bp, Homo sapiens
ttttaatgaagacaatttgtaaagtaatactgttatgtatatgctaaatgttggtaaatactaattaatttccatcatttgtagacttgttttgcaatgggatatatttttacttataataccaatttaggctgggcgcagtggctcacgcctgtaatcccagcactttgggaggccaaggcaaacggatca

SEQ ID NO: 13993 - DNA, 474 bp, Homo sapiens
  misc_feature 347, 358, 376, 395, 409, 418, 435, 443, 454, 456, 458, 465: n = A,T,C or G
ggggatgaatgttcagttgaagtaataccaaaactaaaggattagaagcaaagtatttgaatgtatagagctaggcatgagaacccagaacgtacacctaatgacagagcctgtgcgttccctgaattttgtaccaatcaaaacccttcacctgtcctgccatttcccttgctgctgcctcattgggtggaagtggccacctgtagttttccagaaaattcacagagcaccgctggctgagctggtgtcccattaccactccaggcgtatgctggtacatgtaccaaattcacacagaatgtctggggcactcgggggagacactgtgggaacaaaaagaccaacanaagccctcctntttcaaactcgctgtgcnacccaaaaggcacctgtgntttctggtggtgangcagggcanatttacatttaagaagnctactttnagctgatgcgngntnatgctgnatcccacct

SEQ ID NO: 13994 - DNA, 416 bp, Homo sapiens; identical to SEQ ID NO: 11221

SEQ ID NO: 13995 - DNA, 818 bp, Homo sapiens
  misc_feature 5, 9, 16, 27, 47, 57, 60, 68, 643, 712, 728, 732, 748, 749,755, 768, 772, 774, 775, 777, 778, 779, 784, 799, 801, 805,809: n = A,T,C or G
gaccntacnataccgncttgcttgttncttttggccgcagcggcctncggctgcganagnacgacagnagggggccggtggcgggactctggggaaaatggctgcgtcttcgagtgggaacttatagaaatgctggcaatttcaagaaaccaaaagttgttacaggctggagaggaaaaccaggtcctggagttgttaattcaccgagatggggaatttcaagaactaatgaaattggcacttaatcagggaaaaattcatcatgaaatgcaagttttagaaaaagaagtagagaagagagacagtgatattcagcagctacaaaaacagctaaaggaagcagaacaaatactggcaacagctgtttaccaagcgaaggagaaactcaagtcaatagaaaaagcaagaaaaggtgctatctcctctgaagaaataattaagtatgcacataggatcagtgcaagtaatgctgtatgtgctccactgacctgggttccaggggacccccggagaccctacccaactgatttaaagatgagaagtgggttactgggtcagatgaacaatccttccactaatggcgtgaatggccatttaccaggagatgcacttgcagcaggaagattgccagatgtccttgctncacagtatccatggcagtcaaatgacatgtcgatgaatatgttaccaccaatcatagtatgacttttgntggacctcctggcctntaanaaatgaagatgatgtnnagattntgtcacggctctnagcngnntnnngagtntgattgaaaccttanancatntccnattgatctg

SEQ ID NO: 13996 - DNA, 486 bp, Homo sapiens
tgacactatagaacaagtttgtacaaaaaagcagctggtaccggtccggaattcccgggatatcgtcgacccacgcgtccgcccacgcgtccggcgggagcggccaaaatgaagtttaatccctttgtgacttccgaccgaagcaagaatcgcaaaaggcatttcaatgcaccttcccacattcgaaggaagattatgtcttcccctctttccaaagagctgagacagaagtacaacgtgcgatccatgcccatccgaaaggatgatgaagttcaggttgtacgtggacactataaaggtcagcaaattggcaaagtagtccaggtttacaggaagaaatatgttatctacattgaacgggtgcagcgggaaaaggctaatggcacaactgtccacgtaggcattcaccccagcaaggtggttatcactaggctaaaactggacaaagaccgcaaaaagatcctcgaacggaaagccaaatctcgc
